(19) United States
(12) Patent Application Publication
(10) Pub. No.: US 2022/0387616 A1
(43) Pub. Date: Dec. 8, 2022

(54) SIALIDASE-HER2-ANTIBODY FUSION PROTEINS AND METHODS OF USE THEREOF

(71) Applicant: Palleon Pharmaceuticals Inc., Waltham, MA (US)

(72) Inventors: Li Peng, Lexington, MA (US); Lizhi Cao, Stoneham, MA (US); Wayne C. Gatlin, Wakefield, MA (US); Weiguo Yao, Auburndale, MA (US); Zakir B. Siddiquee, Cambridge, MA (US); Sujata B. Nerle, Somerville, MA (US); Jenny Che, Ashland, MA (US)

(21) Appl. No.: 17/624,124

(22) PCT Filed: Jul. 3, 2020
(86) PCT No.: PCT/US2020/040816

§ 371 Date: Dec. 30, 2021

Related U.S. Application Data
(60) Provisional application No. 62/957,041, filed on Jan. 3, 2020.
(60) Provisional application No. 62/870,341, filed on Jul. 3, 2019.

(51) Int. Cl. A61K 47/68; A61K 31/7088; A61K 35/17; A61K 38/47; A61P 35/00; C12N 9/24

(52) U.S. Cl. CPC A61K 47/6815; A61K 31/7088; A61K 35/17; A61K 38/47; A61K 47/6849; A61K 47/6855; A61P 35/00; C12N 9/2402; C12Y 302/01018

(57) ABSTRACT

The invention relates generally to recombinant sialidase and anti-HER2 immunoglobulin antigen-binding domain fusion proteins. The invention also provides antibody conjugates including a sialidase and an anti-HER2 antibody or a portion thereof. The invention further relates to methods of using the sialidase fusion proteins or antibody conjugates for treating cancer.

### CROSS REFERENCE TO RELATED APPLICATIONS

[0001] This application claims the benefit of, and priority to, U.S. Provisional Patent Application Ser. No. 62/870,341, filed Jul. 3, 2019, and U.S. Provisional Patent Application Ser. No. 62/957,041, filed Jan. 3, 2020, the entire disclosure of each of which is hereby incorporated by reference in its entirety.

### FIELD OF THE INVENTION

[0002] The invention relates generally to recombinant sialidase fusion proteins and antibody conjugates, and their use in the treatment of cancer.

### BACKGROUND

[0003] A growing body of evidence supports roles for glycans, and sialoglycans in particular, at various pathophysiological steps of tumor progression. Glycans regulate tumor proliferation, invasion, hematogenous metastasis and angiogenesis (Fuster et al. (2005) NAT. REV. CANCER 5(7): 526-42). The sialylation of cell surface glycoconjugates is frequently altered in cancers, resulting in the expression of sialylated tumor-associated carbohydrate antigens. The expression of sialylated glycans by tumor cells is often associated with increased aggressiveness and metastatic potential of a tumor.

[0004] It has recently become apparent that Siglecs (sialic acid-binding immunoglobulin-like lectins), a family of sialic acid binding lectins, play a role in cancer immune suppression by binding to hypersialylated cancer cells and mediating the suppression of signals from activating NK cell receptors, thereby inhibiting NK cell-mediated killing of tumor cells (Jandus et al. (2014) J. CLIN. INVEST. 124: 1810-1820; Läubli et al. (2014) PROC. NATL. ACAD. SCI. USA 111: 14211-14216; Hudak et al. (2014) NAT. CHEM. BIOL. 10: 69-75). Likewise, enzymatic removal of sialic acids by treatment with sialidase can enhance NK cell-mediated killing of tumor cells (Jandus, supra; Hudak, supra; Xiao et al. (2016) PROC. NATL. ACAD. SCI. USA 113(37): 10304-9).

[0005] The gene encoding HER2 is located on chromosome 17 and is a member of the EGF/erbB growth factor receptor gene family, which also includes epidermal growth factor receptor (EGFR, or HER1), HER3/erbB3 and HER4/erbB4. All of these genes encode transmembrane growth factor receptors, which are tyrosine kinase type 1 receptors with growth stimulating potential. Activation of HER family members generally occurs when the ligand and a dimer of the same monomer or other member of the HER family are bound together. HER2 has no known ligand. Once activation has occurred, tyrosine autophoshorylation of cytoplasmic signal proteins transmit signals to the nucleus, thus regulating aspects of cell growth, division, differentiation and migration.

[0006] Overexpression of HER2 receptors results in receptors transmitting excessive signals for cell proliferation to the nucleus, which may lead to more aggressive growth of a transformed cell. Data supports the hypothesis that overexpression of HER2 directly contributes to the pathogenesis and clinical aggressiveness of tumor cells. This overexpression is associated with poor prognosis, including reduced relapse-free and overall survival. Anti-HER2 antibodies include trastuzumab, approved for use in, for example, breast cancers and gastric or gastroesophageal junction adenocarcinomas, and pertuzumab, approved for use in, for example, breast cancers.

[0007] Cancer immunotherapy with immune checkpoint inhibitors, including antibodies blocking the PD-1/PD-L1 pathway, has improved the outcome of many cancer patients. However, despite advances that have been made to date, many patients do not respond to currently available immune checkpoint inhibitors. Accordingly, there is still a need for effective interventions that overcome the immune suppressive tumor microenvironment and for treating cancers associated with hypersialylated cancer cells.

### SUMMARY OF THE INVENTION

[0008] The invention is based, in part, upon the discovery that it is possible to produce fusion proteins containing a sialidase enzyme and an anti-HER2 immunoglobulin antigen-binding and/or antibody conjugates including a sialidase enzyme and an anti-HER2 antibody or a portion thereof. The fusion proteins and/or antibody conjugates have suitable substrate specificities and activities to be useful in removing sialic acid and/or sialic acid containing molecules from the surface of cancer cells, e.g., HER2-expressing cancer cells, and/or removing sialic acid and/or sialic acid containing molecules from the tumor microenvironment, and/or reducing the concentration of sialic acid and/or sialic acid containing molecules in the tumor microenvironment.

[0009] Accordingly, in one aspect, the invention provides a fusion protein comprising (or consisting essentially of): (a) sialidase enzyme; and (b) an anti-HER2 immunoglobulin antigen-binding domain.

[0010] In certain embodiments, the sialidase is a human sialidase, e.g., a recombinant mutant human sialidase. In certain embodiments, the sialidase comprises: (a) a substitution of a proline residue at a position corresponding to position 5 of wild-type human Neu2 (P5); (b) a substitution of a lysine residue at a position corresponding to position 9 of wild-type human Neu2 (K9); (c) a substitution of a lysine residue at a position corresponding to position 44 of wild-type human Neu2 (K44); (d) a substitution of a lysine residue at a position corresponding to position 45 of wild-type human Neu2 (K45); (e) a substitution of a leucine residue at a position corresponding to position 54 of wild-type human Neu2 (L54); (f) a substitution of a proline residue at a position corresponding to position 62 of wild-type human Neu2 (P62); (g) a substitution of a glutamine residue at a position corresponding to position 69 of wild-type human Neu2 (Q69); (h) a substitution of an arginine residue at a position corresponding to position 78 of wild-type human Neu2 (R78); (i) a substitution of an aspartic acid residue at a position corresponding to position 80 of wild-type human Neu2 (D80); (j) a substitution of an alanine residue at a position corresponding to position 93 of wild-type human Neu2 (A93); (k) a substitution of a glycine residue at a position corresponding to position 107 of wild-type human Neu2 (G107); (l) a substitution of a glutamine residue at a position corresponding to position 108 of wild-type human Neu2 (Q108); (m) a substitution of a glutamine residue at a position corresponding to position 112 of wild-type human Neu2 (Q112); (n) a substitution of a cysteine residue at a position corresponding to position 125 of wild-type human Neu2 (C125); (o) a substitution of a glutamine residue at a position corresponding to position 126 of wild-type human Neu2 (Q126); (p) a substitution of an alanine residue at a position corresponding to position 150 of wild-type human Neu2 (A150); (q) a substitution of a cysteine residue at a position corresponding to position 164 of wild-type human Neu2 (C164); (r) a substitution of an arginine residue at a position corresponding to position 170 of wild-type human Neu2 (R170); (s) a substitution of an alanine residue at a position corresponding to position 171 of wild-type human Neu2 (A171); (t) a substitution of a glutamine residue at a position corresponding to position 188 of wild-type human Neu2 (Q188); (u) a substitution of an arginine residue at a position corresponding to position 189 of wild-type human Neu2 (R189); (v) a substitution of an alanine residue at a position corresponding to position 213 of wild-type human Neu2 (A213); (w) a substitution of a leucine residue at a position corresponding to position 217 of wild-type human Neu2 (L217); (x) a substitution of a glutamic acid residue at a position corresponding to position 225 of wild-type human Neu2 (E225); (y) a substitution of a histidine residue at a position corresponding to position 239 of wild-type human Neu2 (H239); (z) a substitution of a leucine residue at a position corresponding to position 240 of wild-type human Neu2 (L240); (aa) a substitution of an arginine residue at a position corresponding to position 241 of wild-type human Neu2 (R241); (bb) a substitution of an alanine residue at a position corresponding to position 242 of wild-type human Neu2 (A242); (cc) a substitution of a valine residue at a position corresponding to position 244 of wild-type human Neu2 (V244); (dd) a substitution of a threonine residue at a position corresponding to position 249 of wild-type human Neu2 (T249); (ee) a substitution of an aspartic acid residue at a position corresponding to position 251 of wild-type human Neu2 (D251); (ff) a substitution of a glutamic acid residue at a position corresponding to position 257 of wild-type human Neu2 (E257); (gg) a substitution of a serine residue at a position corresponding to position 258 of wild-type human Neu2 (S258); (hh) a substitution of a leucine residue at a position corresponding to position 260 of wild-type human Neu2 (L260); (ii) a substitution of a valine residue at a position corresponding to position 265 of wild-type human Neu2 (V265); (jj) a substitution of a glutamine residue at a position corresponding to position 270 of wild-type human Neu2 (Q270); (kk) a substitution of a tryptophan residue at a position corresponding to position 292 of wild-type human Neu2 (W292); (ll) a substitution of a serine residue at a position corresponding to position 301 of wild-type human Neu2 (S301); (mm) a substitution of a tryptophan residue at a position corresponding to position 302 of wild-type human Neu2 (W302); (nn) a substitution of a valine residue at a position corresponding to position 363 of wild-type human Neu2 (V363); or (oo) a substitution of a leucine residue at a position corresponding to position 365 of wild-type human Neu2 (L365); or a combination of any of the foregoing substitutions. For example, the sialidase may comprise a substitution of K9, P62, A93, Q216, A242, Q270, 5301, W302, V363, or L365, or a combination of any of the foregoing substitutions.

[0011] In certain embodiments, in the sialidase: (a) the proline residue at a position corresponding to position 5 of wild-type human Neu2 is substituted by histidine (P5H); (b) the lysine residue at a position corresponding to position 9 of wild-type human Neu2 is substituted by aspartic acid (K9D); (c) the lysine residue at a position corresponding to position 44 of wild-type human Neu2 is substituted by arginine (K44R) or glutamic acid (K44E); (d) the lysine residue at a position corresponding to position 45 of wild-type human Neu2 is substituted by alanine (K45A), arginine (K45R), or glutamic acid (K45E); (e) the leucine residue at a position corresponding to position 54 of wild-type human Neu2 is substituted by methionine (L54M); (f) the proline residue at a position corresponding to position 62 of wild-type human Neu2 is substituted by asparagine (P62N), aspartic acid (P62D), histidine (P62H), glutamic acid (P62E), glycine (P62G), serine (P62S), or threonine (P62T); (g) the glutamine residue at a position corresponding to position 69 of wild-type human Neu2 is substituted by histidine (Q69H); (h) the arginine residue at a position corresponding to position 78 of wild-type human Neu2 is substituted by lysine (R78K); (i) the aspartic acid residue at a position corresponding to position 80 of wild-type human Neu2 is substituted by proline (D80P); (j) the alanine residue at a position corresponding to position 93 of wild-type human Neu2 is substituted by glutamic acid (A93E) or lysine (A93K); (k) the glycine residue at a position corresponding to position 107 of wild-type human Neu2 is substituted by aspartic acid (G107D); (l) the glutamine residue at a position corresponding to position 108 of wild-type human Neu2 is substituted by histidine (Q108H); (m) the glutamine residue at a position corresponding to position 112 of wild-type human Neu2 is substituted by arginine (Q112R) or lysine (Q112K); (n) the cysteine residue at a position corresponding to position 125 of wild-type human Neu2 is substituted by leucine (C125L); (o) the glutamine residue at a position corresponding to position 126 of wild-type human Neu2 is substituted by leucine (Q126L), glutamic acid (Q126E), phenylalanine (Q126F), histidine (Q126H), isoleucine (Q1261), or tyrosine (Q126Y); (p) the alanine residue at a position corresponding to position 150 of wild-type human Neu2 is substituted by valine (A150V); (q) the cysteine residue at a position corresponding to position 164 of wild-type human Neu2 is substituted by glycine (C164G); (r) the arginine residue at a position corresponding to position 170 of wild-type human Neu2 is substituted by proline (R170P); (s) the alanine residue at a position corresponding to position 171 of wild-type human Neu2 is substituted by glycine (A171G); (t) the glutamine residue at a position corresponding to position 188 of wild-type human Neu2 is substituted by proline (Q188P); (u) the arginine residue at a position corresponding to position 189 of wild-type human Neu2 is substituted by proline (R189P); (v) the alanine residue at a position corresponding to position 213 of wild-type human Neu2 is substituted by cysteine (A213C), asparagine (A213N), serine (A213S), or threonine (A213T); (w) the leucine residue at a position corresponding to position 217 of wild-type human Neu2 is substituted by alanine (L217A) or valine (L217V); (x) the threonine residue at a position corresponding to position 249 of wild-type human Neu2 is substituted by alanine (T249A); (y) the aspartic acid residue at a position corresponding to position 251 of wild-type human Neu2 is substituted by glycine (D251G); (z) the glutamic acid residue at a position corresponding to position 225 of wild-type human Neu2 is substituted by proline (E225P); (aa) the histidine residue at a position corresponding to position 239 of wild-type human Neu2 is substituted by proline (H239P); (bb) the leucine residue at a position corresponding to position 240 of wild-type human Neu2 is substituted by aspartic acid (L240D), asparagine (L240N), or tyrosine (L240Y); (cc) the arginine residue at a position corresponding to position 241 of wild-type human Neu2 is substituted by alanine (R241A), aspartic acid (R241D), leucine (R241L), glutamine (R241Q), or tyrosine (R241Y); (dd) the alanine residue at a position corresponding to position 242 of wild-type human Neu2 is substituted by cysteine (A242C), phenylalanine (A242F), glycine (A242G), histidine (A242H), isoleucine (A242I), lysine (A242K), leucine (A242L), methionine (A242M), asparagine (A242N), glutamine (A242Q), arginine (A242R), serine (A242S), valine (A242V), tryptophan (A242W), or tyrosine (A242Y); (ee) the valine residue at a position corresponding to position 244 of wild-type human Neu2 is substituted by isoleucine (V244I), lysine (V244K), or proline (V244P); (ff) the glutamic acid residue at a position corresponding to position 257 of wild-type human Neu2 is substituted by proline (E257P); (gg) the serine residue at a position corresponding to position 258 is substituted by cysteine (S258C); (hh) the leucine residue at a position corresponding to position 260 of wild-type human Neu2 is substituted by aspartic acid (L260D), phenylalanine (L260F), glutamine (L260Q), or threonine (L260T); (ii) the valine residue at a position corresponding to position 265 of wild-type human Neu2 is substituted by phenylalanine (V265F); (jj) the glutamine residue at a position corresponding to position 270 of wild-type human Neu2 is substituted by alanine (Q270A), histidine (Q270H), phenylalanine (Q270F), proline (Q270P), serine (Q270S), or threonine (Q270T); (kk) the tryptophan residue at a position corresponding to position 292 of wild-type human Neu2 is substituted by arginine (W292R); (ll) the serine residue at a position corresponding to position 301 of wild-type human Neu2 is substituted by alanine (S301A), aspartic acid (S301D), glutamic acid (S301E), phenylalanine (S301F), histidine (S301H), lysine (S301K), leucine (S301L), methionine (S301M), asparagine (S301N), proline (S301P), glutamine (S301Q), arginine (S301R), threonine (S301T), valine (S301V), tryptophan (S301W), or tyrosine (S301Y); (mm) the tryptophan residue at a position corresponding to position 302 of wild-type human Neu2 is substituted by alanine (W302A), aspartic acid (W302D), phenylalanine (W302F), glycine (W302G), histidine (W302H), isoleucine (W302I), lysine (W302K), leucine (W302L), methionine (W302M), asparagine (W302N), proline (W302P), glutamine (W302Q), arginine (W302R), serine (W302S), threonine (W302T), valine (W302V), or tyrosine (W302Y); (nn) the valine residue at a position corresponding to position 363 of wild-type human Neu2 is substituted by arginine (V363R); or (oo) the leucine residue at a position corresponding to position 365 of wild-type human Neu2 is substituted by glutamine (L365Q), histidine (L365H), isoleucine (L365I), lysine (L365K) or serine (L365S); or the sialidase comprises a combination of any of the foregoing substitutions. For example, the sialidase may comprise a substitution selected from K9D, P62G, P62N, P62S, P62T, A93E, Q126Y, A242F, A242W, A242Y, Q270A, Q270T, S301A, S301R, W302K, W302R, V363R, and L365I, or a combination of any of the foregoing substitutions.

[0012] In certain embodiments, the sialidase comprises: (a) a substitution or deletion of a methionine residue at a position corresponding to position 1 of wild-type human Neu2 (M1); (b) a substitution of a valine residue at a position corresponding to position 6 of wild-type human Neu2 (V6); (c) a substitution of an isoleucine residue at a position corresponding to position 187 of wild-type human Neu2 (I187); or (d) a substitution of a cysteine residue at a position corresponding to position 332 of wild-type human Neu2 (C332); or a combination of any of the foregoing substitutions.

[0013] In certain embodiments, in the sialidase: (a) the methionine residue at a position corresponding to position 1 of wild-type human Neu2 is deleted (AM1), is substituted by alanine (M1A), or is substituted by aspartic acid (M1D); (b) the valine residue at a position corresponding to position 6 of wild-type human Neu2 is substituted by tyrosine (V6Y); (c) the isoleucine residue at a position corresponding to position 187 of wild-type human Neu2 is substituted by lysine (I187K); or (d) the cysteine residue at a position corresponding to position 332 of wild-type human Neu2 is substituted by alanine (C332A); or the sialidase comprises a combination of any of the foregoing substitutions.

[0014] In certain embodiments, the sialidase comprises: (a) the M1D, V6Y, P62G, A93E, I187K, and C332A substitutions; (b) the M1D, V6Y, K9D, A93E, I187K, C332A, V363R, and L365I substitutions; (c) the M1D, V6Y, P62N, I187K, and C332A substitutions; (d) the M1D, V6Y, I187K, Q270A, S301R, W302K, and C332A substitutions; (e) the M1D, V6Y, P62S, I187K, Q270A, S301R, W302K, and C332A substitutions; (f) the M1D, V6Y, P62T, I187K, Q270A, S301R, W302K, and C332A substitutions; (g) the M1D, V6Y, P62N, I187K, Q270A, S301R, W302K, and C332A substitutions; (h) the M1D, V6Y, P62G, A93E, I187K, S301A, W302R, and C332A substitutions; (i) the M1D, V6Y, P62G, A93E, Q126Y, I187K, Q270T, and C332A substitutions; (j) the M1D, V6Y, P62G, A93E, Q126Y, I187K, and C332A substitutions; or (k) the M1D, V6Y, P62G, A93E, Q126Y, I187K, A242F, Q270T, and C332A substitutions.

[0015] In certain embodiments, the sialidase is selected from Neu1, Neu2, Neu3, and Neu4, e.g., the sialidase is Neu2.

[0016] In certain embodiments, the sialidase has a different substrate specificity than the corresponding wild-type sialidase. For example, in certain embodiments the sialidase can cleave α2,3, α2,6, and/or α2,8 linkages. In certain embodiments the sialidase can cleave α2,3 and α2,8 linkages.

[0017] In certain embodiments, the sialidase comprises any one of SEQ ID NOs: 48-62, 111, 114, 117, or 151, or an amino acid sequence that has at least 85%, 90%, 95%, 96%, 97%, 98%, or 99% sequence identity to any one of SEQ ID NOs: 48-62, 111, 114, 117, or 151.

[0018] In certain embodiments, the sialidase comprises mutation or combination of mutations set forth in any one of Tables 5-12 or 14-27. In certain embodiments, the sialidase comprises a mutation or combination of mutations set forth in any one of Tables 1-4.

[0019] In certain embodiments, the fusion protein further comprises an immunoglobulin Fc domain. In certain embodiments, the immunoglobulin Fc domain is derived from a human IgG1, IgG2, IgG3, IgG4, IgA1, IgA2, IgD, IgE, or IgM Fc domain, e.g., the immunoglobulin Fc domain is derived from a human IgG1, IgG2, IgG3, or IgG4 Fc domain, e.g., the immunoglobulin Fc domain is derived from a human IgG1 Fc domain.

[0020] In certain embodiments, the anti-HER2 immunoglobulin antigen-binding domain is associated (for example, covalently or non-covalently associated) with a second anti-HER2 immunoglobulin antigen-binding domain to produce an anti-HER2 antigen-binding site.

[0021] In certain embodiments, the anti-HER2 immunoglobulin antigen-binding domain is derived from an antibody selected from trastuzumab, pertuzumab, CT-P6, trastuzumab-dkst, MGAH22 (margetuximab), PF-05280014, ertumaxomab, gancotamab, timigutuzumab, Ontruzant, ABP-980, SB3, DS-8201, MYL-1410, BCD-022, and HD201, e.g., the anti-HER2 immunoglobulin antigen-binding domain is derived from trastuzumab.

[0022] In certain embodiments, the sialidase and the immunoglobulin Fc domain and/or the anti-HER2 immunoglobulin antigen-binding domain are linked by a peptide bond or an amino acid linker.

[0023] In certain embodiments, the fusion protein comprises any one of SEQ ID NOs: 66-85, 98-106, 112, 113, 115, 116, 118, 119, 122-134, 141, 143, 145, 147, or 152-155.

[0024] In another aspect, the invention provides an antibody conjugate comprising any of the foregoing fusion proteins. In certain embodiments, the antibody conjugate comprises a single sialidase. In other embodiments, the antibody conjugate comprises two sialidases, which can be the same or different. In certain embodiments the antibody conjugate comprises two identical sialidases. In certain embodiments, the antibody conjugate comprises a single anti-HER2 antigen-binding site. In other embodiments, the antibody conjugate comprises two anti-HER2 antigen-binding sites, which can be the same or different. In certain embodiments, the antibody conjugate comprises two identical anti-HER2 antigen-binding sites.

[0025] In certain embodiments, the antibody conjugate has a molecular weight from about 135 kDa to about 165 kDa, or the antibody conjugate has a molecular weight from about 215 kDa to about 245 kDa.

[0026] In certain embodiments, the antibody conjugate comprises: (a) a first polypeptide comprising an immunoglobulin light chain; (b) a second polypeptide comprising an immunoglobulin heavy chain; and (c) a third polypeptide comprising an immunoglobulin Fc domain and a sialidase; wherein the first and second polypeptides are covalently linked together and the second and third polypeptides are covalently linked together, and wherein the first polypeptide and the second polypeptide together define an anti-HER2 antigen-binding site. The third polypeptide may, for example, comprise the sialidase and the immunoglobulin Fc domain in an N- to C-terminal orientation. The first polypeptide may, for example, comprise SEQ ID NO: 66, the second polypeptide may, for example, comprise any one of SEQ ID NOs: 67 or 149, and/or the third polypeptide may, for example, comprise any one of SEQ ID NOs: 68-74, 98-104, 112, 113, 115, 116, 118, 119, 141, 143, 145, 147, 152, or 154.

[0027] In certain embodiments, the antibody conjugate comprises: (a) a first polypeptide comprising a first immunoglobulin light chain; (b) a second polypeptide comprising a first immunoglobulin heavy chain and a first sialidase; (c) a third polypeptide comprising a second immunoglobulin heavy chain and a second sialidase; and (d) a fourth polypeptide comprising a second immunoglobulin light chain; wherein the first and second polypeptides are covalently linked together, the third and fourth polypeptides are covalently linked together, and the second and third polypeptides are covalently linked together, and wherein the first polypeptide and the second polypeptide together define a first anti-HER2 antigen-binding site, and the third polypeptide and the fourth polypeptide together define a second anti-HER2 antigen-binding site. The second and third polypeptides may, for example, comprise the first and second immunoglobulin heavy chain and the first and second sialidase, respectively, in an N- to C-terminal orientation.

[0028] In certain embodiments, the antibody conjugate comprises: (a) a first polypeptide comprising a first sialidase, a first immunoglobulin Fc domain, and a first single chain variable fragment (scFv); and (b) a second polypeptide comprising a second sialidase, a second immunoglobulin Fc domain, and an optional second single chain variable fragment (scFv); wherein the first and second polypeptides are covalently linked together, and wherein the first scFv defines a first anti-HER2 antigen-binding site, and the second scFv, when present, defines a second anti-HER2 antigen-binding site. The first polypeptide may, for example comprise the first sialidase, the first immunoglobulin Fc domain, and the first scFv in an N- to C-terminal orientation. The second polypeptide may, for example, comprise the second sialidase, the second immunoglobulin Fc domain, and the optional second scFv in an N- to C-terminal orientation. The first polypeptide may, for example, comprise any one of SEQ ID NOs: 77-83, 122-134, 153, or 155, and/or the second polypeptide may, for example, comprise any one of SEQ ID NOs: 77-83, 122-134, 153, or 155.

[0029] In certain embodiments, the antibody conjugate comprises: (a) a first polypeptide comprising an immunoglobulin light chain; (b) a second polypeptide comprising an immunoglobulin heavy chain and a single chain variable fragment (scFv); and (c) a third polypeptide comprising an immunoglobulin Fc domain and a sialidase, wherein the first and second polypeptides are covalently linked together and the second and third polypeptides are covalently linked together, and wherein the immunoglobulin light chain and immunoglobulin heavy chain together define a first anti-HER2 antigen-binding site and the scFv defines a second anti-HER2 antigen-binding site. The second polypeptide may, for example comprise the immunoglobulin heavy chain and the scFv in an N- to C-terminal orientation. The third polypeptide may, for example, comprise the sialidase and the immunoglobulin Fc domain in an N- to C-terminal orientation.

[0030] In another aspect, the invention provides an isolated nucleic acid comprising a nucleotide sequence encoding any of the foregoing fusion proteins or at least a portion of any of the foregoing antibody conjugates. In another aspect, the invention provides an expression vector comprising any of the foregoing nucleic acids. In another aspect, the invention provides a host cell comprising any of the foregoing expression vectors.

[0031] In another aspect, the invention provides a pharmaceutical composition comprising any of the foregoing fusion proteins or any of the foregoing antibody conjugates.

[0032] In another aspect, the invention provides a method of treating cancer in a subject in need thereof. The method comprises administering to the subject an effective amount of any of the foregoing fusion proteins, any of the foregoing antibody conjugates, or any of the foregoing pharmaceutical compositions.

[0033] In certain embodiments, the cancer is selected from lung bronchioloalveolar carcinoma (BAC), bladder cancer, a female genital tract malignancy (e.g., uterine serous carcinoma, endometrial carcinoma, vulvar squamous cell carcinoma, and uterine sarcoma), an ovarian surface epithelial carcinoma (e.g., clear cell carcinoma of the ovary, epithelial ovarian cancer, fallopian tube cancer, and primary peritoneal cancer), breast carcinoma, non-small cell lung cancer (NSCLC), a male genital tract malignancy (e.g., testicular cancer), retroperitoneal or peritoneal carcinoma, gastroesophageal adenocarcinoma, esophagogastric junction carcinoma, liver hepatocellular carcinoma, esophageal and esophagogastric junction carcinoma, cervical cancer, cholangiocarcinoma, pancreatic adenocarcinoma, extrahepatic bile duct adenocarcinoma, a small intestinal malignancy, gastric adenocarcinoma, cancer of unknown primary (CUP), colorectal adenocarcinoma, esophageal carcinoma, prostatic adenocarcinoma, kidney cancer, head and neck squamous carcinoma, thymic carcinoma, non-melanoma skin cancer, thyroid carcinoma (e.g., papillary carcinoma), a head and neck cancer, anal carcinoma, non-epithelial ovarian cancer (non-EOC), uveal melanoma, malignant pleural mesothelioma, small cell lung cancer (SCLC), a central nervous system cancer, a neuroendocrine tumor, and a soft tissue tumor. For example, in certain embodiments, the cancer is breast cancer, non-small cell lung cancer, bladder cancer, kidney cancer, colon cancer, or melanoma.

[0034] In another aspect, the invention provides a method of promoting infiltration of immune cells into a tumor in a subject in need thereof. The method comprises administering to the subject an effective amount of any of the foregoing fusion proteins, any of the foregoing antibody conjugates, or any of the foregoing pharmaceutical compositions. In certain embodiments, the immune cells are T-cells, e.g., CD4+ and/or CD8+ T-cells, e.g., CD69⁺CD8⁺ and/or GzmB⁺CD8⁺ T-cells. In certain embodiments, the immune cells are natural killer (NK) cells.

[0035] In another aspect, the invention provides a method of increasing the number of circulating natural killer (NK) cells in a subject in need thereof. The method comprises administering to the subject an effective amount of any of the foregoing fusion proteins, any of the foregoing antibody conjugates, or any of the foregoing pharmaceutical compositions, so as to increase the number of circulating NK cells relative to prior to administration of the fusion protein, antibody conjugate or pharmaceutical composition.

[0036] In another aspect, the invention provides a method of increasing the number of T-cells in the draining lymph node in subject in need thereof. The method comprises administering to the subject an effective amount of any of the foregoing fusion proteins, any of the foregoing antibody conjugates, or any of the foregoing pharmaceutical compositions, so as to increase the number of T-cells in the draining lymph node relative to prior to administration of the fusion protein, antibody conjugate or pharmaceutical composition. In certain embodiments, the immune cells are T-cells, e.g., CD4+ and/or CD8+ T-cells.

[0037] In another aspect, the invention provides a method of increasing expression of Cd3, Cd4, Cd8, Cd274, Ctla4, Icos, Pdcd1, Lag3, Il6, Il1b, Il2, Ifng, Ifna1, Mx1, Gzmb, Cxcl9, Cxcl12, and/or Ccl5 in a cell, tissue, or subject. The method comprises contacting the cell, tissue, or subject with an effective amount of any of the foregoing fusion proteins, any of the foregoing antibody conjugates, or any of the foregoing pharmaceutical compositions, so as to increase the expression of Cd3, Cd4, Cd8, Cd274, Ctla4, Icos, Pdcd1, Lag3, Il6, Il1b, Il2, Ifng, Ifna1, Mx1, Gzmb, Cxcl9, Cxcl12, and/or Ccl5 relative to the cell, tissue or subject prior to contact with the fusion protein, antibody conjugate or pharmaceutical composition.

[0038] These and other aspects and features of the invention are described in the following detailed description and claims.

### DESCRIPTION OF THE DRAWINGS

[0039] The invention can be more completely understood with reference to the following drawings.

[0040] FIG. 1 depicts an SDS-PAGE gel showing recombinant human Neu1, Neu2, Neu3, and Salmonella typhimurium (St-sialidase) under non-reducing and reducing conditions. Monomer and dimer species are indicated.

[0041] FIG. 2 is a bar graph showing the enzymatic activity of recombinant human Neu1, Neu2, and Neu3.

[0042] FIG. 3 is a line graph showing enzymatic activity as a function of substrate concentration for recombinant human Neu2 and Neu3 at the indicated pH.

[0043] FIG. 4 depicts a schematic representation of an exemplary sialic acid biotinylated probe that can be used in phage display or yeast display screening for Neu2 variants.

[0044] FIG. 5 depicts an exemplary protocol that facilitates phage display screening of Neu2 variants.

[0045] FIG. 6 depicts an exemplary protocol that facilitates yeast display screening of Neu2 variants.

[0046] FIG. 7A depicts an SDS-PAGE gel showing recombinant Neu2-Fc (wildtype) and Neu2-M106-Fc under non-reducing and reducing conditions. FIG. 7B is an SEC-HPLC trace of Neu2-Fc (wildtype) and Neu2-M106-Fc. The monomer species has a retention time of 21 minutes.

[0047] FIG. 8 is a line graph depicting the enzymatic activity of Neu2 variant M106.

[0048] FIG. 9A depicts an SDS-PAGE gel showing Neu2-M173-Fc under non-reducing and reducing conditions. FIG. 9B is an SEC-HPLC trace of Neu2-M173-Fc. The monomer species has a retention time of 6.367 minutes. The monomer species has a purity of approximately 90% after purification by Protein A and CHT chromatography.

[0049] FIG. 10 depicts the enzyme activity of Neu2-M173-Fc, using 4-MU-Neu5Ac as the substrate, and fixing enzyme concentration to 2 μg/well.

[0050] FIG. 11A depicts an SDS-PAGE gel showing Neu2-M106 under non-reducing (NR) and reducing (R) conditions. FIG. 11B depicts a schematic representation of the Neu2 structure with the position of the R243 cleavage site indicated.

[0051] FIG. 12 depicts a reducing SDS-PAGE gel showing Neu2-M106 produced by a large or small scale expression with (+) or without (−) trypsin treatment.

[0052] FIG. 13 depicts an SDS-PAGE gel showing Neu2-M106 following incubation with trypsin and one of the protease inhibitors iron citrate (Fe Cit), aprotinin, AEBSF, leupeptin, or E-64 at the indicated concentrations.

[0053] FIG. 14 is a table depicting different mutations and combinations of mutations surrounding the trypsin cleavage site in Neu2.

[0054] FIG. 15A depicts a reducing SDS-PAGE analysis of Neu2 variants with the indicated mutation at position A242 with or without trypsin treatment. Trypsin digestion was for 5 minutes at 4° C. using a 5,000% dilution of trypsin. The digestion was quenched by addition of SDS, and 2 μg of protein was loaded on the gel. FIG. 15B depicts the enzymatic activity of Neu2 variants with the indicated mutation at position A242. FIG. 15C is an SEC-HPLC trace of Neu2 variants with the indicated mutation at position A242. Neu2-M106 (the mutational background in which the mutations at position A242 were tested) is shown as a control.

[0055] FIG. 16 depicts a reducing SDS-PAGE analysis of the indicated Neu2 variants with or without trypsin treatment. Neu2-M106 is shown as a control. For example, Neu2-M255 was shown to have a greater than 10 fold improved trypsin resistance relative to Neu2-M106.

[0056] FIGS. 17A-17I depict schematic representations of certain antibody conjugate constructs containing a sialidase enzyme, e.g., a human sialidase enzyme, and an anti-HER2 antigen binding site. For each antibody conjugate construct that contains more than one (e.g., two) sialidase, each sialidase may be the same or different. For each antibody conjugate construct that contains more than one (e.g., two) anti-HER2 antigen binding site, each anti-HER2 antigen binding site may be the same or different. For each antibody conjugate construct that contains an Fc domain, it is understood that the Fc domain can be a wild type Fc domain or can be an engineered Fc domain. For example, the Fc domain may be engineered to contain either a “knob” mutation, e.g., T366Y, or a “hole” mutation, e.g., Y407T, or both, to promote heterodimerization, or the Fc domain may be engineered to contain one or more modifications, e.g., point mutations, to provide any other modified Fc domain functionality.

[0057] FIG. 18 depicts schematic representations of certain antibody conjugate constructs containing a sialidase enzyme, e.g., a human sialidase enzyme, and an antigen binding site. For each antibody conjugate construct that contains more than one (e.g., two) antigen binding site, each antigen binding site may be the same or different. For each antibody conjugate construct that contains an Fc domain, it is understood that the Fc domain can be a wild type Fc domain or can be an engineered Fc domain. For example, the Fc domain may be engineered to contain either a “knob” mutation, e.g., T366Y, or a “hole” mutation, e.g., Y407T, or both, to promote heterodimerization, or the Fc domain may be engineered to contain one or more modifications, e.g., point mutations, to provide any other modified Fc domain functionality.

[0058] FIGS. 19A-19D are schematic representations of exemplary fusion protein conjugates referred to as a Raptor antibody sialidase conjugate (FIG. 19A), a Janus antibody sialidase conjugate (FIG. 19B), a Lobster antibody sialidase conjugate (FIG. 19C), and a Bunk antibody sialidase conjugate (FIG. 19D).

[0059] FIG. 20 depicts an SDS-PAGE gel showing purified recombinant human Janus Trastuzumab under non-reducing and reducing conditions.

[0060] FIG. 21 depicts an SEC-HPLC trace of purified Janus Trastuzumab, showing approximately 90% monomer purity.

[0061] FIG. 22 depicts the enzyme activity of Janus Trastuzumab assayed using 4-MU-Neu5Ac as a substrate.

[0062] FIG. 23 depicts binding to HER2 antigen as determined by ForteBio Octet for Janus Trastuzumab (top), and trastuzumab (bottom). Equilibrium dissociation constants (KD) are indicated.

[0063] FIGS. 24A-D depict the testing of various configurations of antibody sialidase conjugates in a mouse syngeneic tumor model utilizing EMT6 mouse breast cancer cells engineered to express human Her2. Mice are treated via intraperitoneal injection of 10 mg/kg of each test article on the days marked with black triangles and tumor volume (mm³) recorded. Each line represents an individual mouse. Mice are treated with either trastuzumab (FIG. 24A), Raptor (FIG. 24B), Janus (FIG. 24C) or Lobster (FIG. 24D).

[0064] FIGS. 25A-D depict the testing of the Janus antibody sialidase conjugate in a mouse syngeneic tumor model utilizing EMT6 mouse breast cancer cells engineered to express human Her2. Mice were treated via intraperitoneal injection of 10 mg/kg of Janus on the days marked with black triangles and tumor volume (mm³) recorded. Mice were also treated on the same days as Janus with either anti-mouse NK1.1 (10 mg/kg) to deplete natural killer cells (FIG. 25A), liposomal clodronate (0.5 mg/mouse, three times a week for two weeks) to deplete macrophages (FIG. 25B), or anti-mouse CD8a (10 mg/kg) to deplete CD8+ T cells (FIG. 25C). Each line represents an individual mouse. FIG. 25D depicts the mean tumor volume with error bars of the indicated treatment groups from Example 7.

[0065] FIGS. 26A-B depict the testing of the Janus antibody sialidase conjugate in a mouse syngeneic orthotopic tumor model utilizing a second source of EMT6 mouse breast cancer cells engineered to express human Her2. Mice are treated via intraperitoneal injection of 10 mg/kg of each test article on the days marked with black triangles and tumor volume (mm³) recorded. Each line represents an individual mouse. Mice are treated (▾) with either vehicle, trastuzumab, Janus or Janus Loss of Function (FIG. 26A). FIG. 26B depicts the rechallenge experiment of either the three mice treated with Janus from FIG. 26A with complete regressions of the original EMT6-Her2 tumors (cured mice) or naïve mice. Cured mice were inoculated with either EMT6-Her2 cells or parental EMT6 cells on the left and right lower flank region. Naïve mice were inoculated with EMT6-Her2 cells.

[0066] FIGS. 27A-B depict the testing of the Janus antibody sialidase conjugate in a mouse syngeneic orthotopic tumor model in combination with anti-mouse PD1. Mice are treated via intraperitoneal injection of 10 mg/kg of either anti-mouse PD1 alone (FIG. 27A) or Janus and anti-mouse PD1 (10 mg/kg of each, FIG. 27B) on the days marked with black triangles (▾) and tumor volume (mm³) recorded. Each line represents an individual mouse.

[0067] FIG. 28 depicts the testing of various test articles in a mouse syngeneic tumor model injected with a B16 melanoma cell line expressing human Her2. Mice are treated via intraperitoneal injection of 10 mg/kg of either Janus, trastuzumab or a combination of anti-mouse PD1 and anti-mouse CTLA4 (10 mg/kg of each) on the days marked with black triangles (▾) and tumor volume (mm³) recorded. Each line represents an individual mouse.

[0068] FIG. 29 depicts the testing of Janus Trastuzumab in a mouse syngeneic tumor model utilizing EMT6 mouse breast cancer cells engineered to express human Her2. Each line represents an individual mouse. Tick marks indicate dosing frequency (total of 5 doses, biweekly). Mice are treated with either Janus Trastuzumab or isotype control.

[0069] FIG. 30 depicts the testing of the effect of Janus Trastuzumab on human M2-like macrophage phagocytosis of either BT-20 tumor cells (FIG. 30A) or HT29 tumor cells (FIG. 30B). Macrophages (“Macro”) were mixed with tumor cells (“tumor”) and trastuzumab, Janus Trastuzumab, or Janus Trastuzumab LOF.

[0070] FIG. 31 depicts the testing of Janus Trastuzumab 2 and trastuzumab in a mouse syngeneic tumor model utilizing EMT6 mouse breast cancer cells engineered to express human Her2. Each line represents an individual mouse. Test groups include vehicle (FIG. 31A), trastuzumab at 10 mg/kg (FIG. 31B), Janus Trastuzumab 2 at 1 mg/kg (FIG. 31C) and Janus Trastuzumab 2 at 10 mg/kg (FIG. 31D). Tick marks indicate dosing frequency (total of 5 doses, biweekly). Numbers of mice with partial responses (PR) and complete responses (CR) are indicated.

[0071] FIG. 32 depicts the testing of Janus Trastuzumab and Janus Trastuzumab 2 in a mouse syngeneic tumor model utilizing EMT6 mouse breast cancer cells engineered to express human Her2. Mean tumor size in each treatment group is shown. Tick marks indicate dosing frequency (total of 5 doses, biweekly).

[0072] FIG. 33 depicts the testing of Janus Trastuzumab and Janus Trastuzumab LOF in a mouse syngeneic tumor model utilizing EMT6 mouse breast cancer cells engineered to express human Her2. Each line represents an individual mouse. Test groups include isotype control (FIG. 33A), Janus Trastuzumab LOF (FIG. 33B) and Janus Trastuzumab (FIG. 33C). Tick marks indicate dosing frequency (total of 5 doses, biweekly). Numbers of mice with partial responses (PR) and complete responses (CR) are indicated.

[0073] FIG. 34 depicts the testing of Janus Trastuzumab 2, trastuzumab, and/or an anti-mouse PD-1 antibody (anti-mPD1) in a mouse syngeneic tumor model injected with a B16 melanoma cell line expressing human Her2. Mice were treated via intraperitoneal injection of 10 mg/kg of either isotype control (FIG. 34A), trastuzumab (FIG. 34B), anti-mPD1 (FIG. 34C), Janus Trastuzumab 2 (FIG. 34D), a combination of Janus Trastuzumab 2 and anti-mPD1 (10 mg/kg of each agent, FIG. 34E), or a combination of trastuzumab and anti-mPD1 (10 mg/kg of each agent, FIG. 34F). Mice were dosed on the days marked with black triangles (Y) and tumor volume (mm³) was recorded. Each line represents an individual mouse. Numbers of mice with partial responses (PR) and complete responses (CR) are indicated.

[0074] FIG. 35 depicts the design of an in vivo pharmacodynamic study in a mouse syngeneic tumor model utilizing EMT6 mouse breast cancer cells engineered to express human Her2.

[0075] FIG. 36 depicts the in vivo desialylation of EMT6-Her2 tumor cells by Janus Trastuzumab 2 as compared to Janus Trastuzumab LOF, trastuzumab or vehicle controls. Janus Trastuzumab 2 treated mice were divided into non-responders (NR) and responders (R) as described in FIG. 35. A decrease in MALII (Maackia amurensis lectin II) staining to CD45 negative tumor cells is indicative of desialylation. The responder group has only N=3 datapoints because tumors were too small to recover or were completely gone.

[0076] FIG. 37 depicts changes in tumor infiltrating CD4+ T cells (FIG. 37A), CD8+ T cells (FIG. 37B), CD69+CD8+ T cells (FIG. 37C), and GzmB+CD8+ T cells (FIG. 37D) for the indicated treatment groups.

[0077] FIG. 38 depicts changes to tumor infiltrating NK cells (FIG. 38A), circulating NK cells (FIG. 38B), and M2 (CD206⁺MHC-II⁻) tumor associated macrophages (TAMs) (FIG. 38C) for the indicated treatment groups.

[0078] FIG. 39 depicts the increase in CD4+ T cells (FIG. 39A) and CD8+ T cells (FIG. 39B) in draining lymph nodes of mice in the indicated treatment groups.

[0079] FIG. 40 depicts sialylation status of circulating cells as determined by SNA lectin staining for RBCs (FIG. 40A), CD4+ T cells (FIG. 40B), CD8+ T cells (FIG. 40C), NK cells (FIG. 40D), myeloid cells (FIG. 40E) and neutrophils (FIG. 40F). Loss of sialic acid by sialidase cleavage leads to an increase in SNA staining.

### DETAILED DESCRIPTION

[0080] Various features and aspects of the invention are discussed in more detail below.

[0081] The invention relates to fusion proteins and/or antibody conjugates comprising a sialidase enzyme and an anti-HER2 antibody or portion thereof, e.g., an immunoglobulin Fc domain and/or an antigen-binding domain. The sialidase enzyme portion of the fusion protein and/or antibody conjugate may comprise at least one mutation relative to a wild-type sialidase. The mutations, or combination of mutations, can improve the expression, activity or both the expression and activity of the sialidase to improve its use in cancer diagnosis and/or treatment.

[0082] The invention further relates to pharmaceutical compositions and methods of using fusion proteins and/or antibody conjugates to treat cancer.

### I. Sialidase Anti-HER2 Fusion Proteins

[0083] To promote the selective removal of sialic acids on hypersialylated cancer cells, e.g., HER2 expressing cancer cells, and/or in the tumor microenvironment, it may be helpful to target a sialidase as described herein to such a cell or to such a tumor microenvironment. Additionally, in order to promote the removal of sialic acid by a sialidase in a subject, it may be helpful to extend the plasma half-life of the sialidase in the subject. These can be achieved by including the sialidase in a fusion protein and/or antibody conjugate (e.g., a chemically conjugated conjugate).

[0084] Accordingly, the invention further provides fusion proteins comprising a sialidase enzyme, or a functional fragment thereof, and a portion or fragment of an anti-HER2 antibody, such as an immunoglobulin Fc domain (also referred to herein as an Fc domain), or an immunoglobulin antigen-binding domain (also referred to herein as an antigen-binding domain). In certain embodiments, the sialidase and anti-HER2 antibody or portion thereof (e.g., immunoglobulin Fc domain or antigen-binding domain) are linked by a peptide bond or an amino acid linker.

[0085] As used herein, unless otherwise indicated, the term “fusion protein” is understood to refer to a single polypeptide chain comprising amino acid sequences based upon two or more separate proteins or polypeptide chains, where the two amino acid sequences may be fused together directly or via an intervening linker sequence, e.g., via an intervening amino acid linker. A nucleotide sequence encoding such a fusion protein can, for example, be created using conventional recombinant DNA technologies.

[0086] In certain embodiments, a fusion protein comprises a tag, such as a Strep tag (e.g., a Strep II tag), a His tag (e.g., a 10× His tag), a myc tag, or a FLAG tag. The tag can be located on the C-terminus or the N-terminus of the fusion protein.

a. Sialidase Portion

[0087] As used herein, the term “sialidase” refers to any enzyme, or a functional fragment thereof, that cleaves a terminal sialic acid residue from a substrate, for example, a glycoprotein or a glycolipid. The term sialidase includes variants having one or more amino acid substitutions, deletions, or insertions relative to a wild-type sialidase sequence, and/or fusion proteins or conjugates including a sialidase. Sialidases are also called neuraminidases, and, unless indicated otherwise, the two terms are used interchangeably herein. As used herein, the term “functional fragment” of a sialidase refers to fragment of a full-length sialidase that retains, for example, at least 10%, at least 20%, at least 30%, at least 40%, at least 50%, at least 60%, at least 70%, at least 80%, at least 90%, at least 95%, or 100% of the enzymatic activity of the corresponding full-length, naturally occurring sialidase. Sialidase enzymatic activity may be assayed by any method known in the art, including, for example, by measuring the release of sialic acid from the fluorogenic substrate 4-methylumbelliferyl-N-acetylneuraminic acid (4MU-NeuAc). In certain embodiments, the functional fragment comprises at least 100, 150, 200, 250, 300, 310, 320, 330, 340, 350, 360, or 370 consecutive amino acids present in a full-length, naturally occurring sialidase.

[0088] In certain embodiments, a sialidase portion of a sialidase-anti-HER2 fusion protein is derived from a eukaryotic sialidase, e.g., a mammalian sialidase, e.g., a human or mouse sialidase.

[0089] Four sialidases are encoded in the human genome: Neu1, Neu2, Neu3 and Neu4. Human Neu1 is a lysosomal neuraminidase enzyme which functions in a complex with beta-galactosidase and cathepsin A. The amino acid sequence of human Neu1 is depicted in SEQ ID NO: 7, and a nucleotide sequence encoding human Neu1 is depicted in SEQ ID NO: 23.

[0090] Human Neu2 is a cytosolic sialidase enzyme. The amino acid sequence of human Neu2 is depicted in SEQ ID NO: 1, and a nucleotide sequence encoding human Neu2 is depicted in SEQ ID NO: 24. Unless stated otherwise, as used herein, wild-type human Neu2 refers to human Neu2 having the amino acid sequence of SEQ ID NO: 1.

[0091] Human Neu3 is a plasma membrane sialidase with an activity specific for gangliosides. Human Neu3 has two isoforms: isoform 1 and isoform 2. The amino acid sequence of human Neu3, isoform 1 is depicted in SEQ ID NO: 8, and a nucleotide sequence encoding human Neu3, isoform 1 is depicted in SEQ ID NO: 25. The amino acid sequence of human Neu3, isoform 2 is depicted in SEQ ID NO: 9, and a nucleotide sequence encoding human Neu3, isoform 2 is depicted in SEQ ID NO: 34.

[0092] Human Neu4 has two isoforms: isoform 1 is a peripheral membrane protein and isoform 2 localizes to the lysosome lumen. The amino acid sequence of human Neu4, isoform 1 is depicted in SEQ ID NO: 10, and a nucleotide sequence encoding human Neu4, isoform 1 is depicted in SEQ ID NO: 26. The amino acid sequence of human Neu4, isoform 2 is depicted in SEQ ID NO: 11, and a nucleotide sequence encoding human Neu4, isoform 2 is depicted in SEQ ID NO: 35.

[0093] Four sialidases have also been found in the mouse genome and are referred to as Neu1, Neu2, Neu3 and Neu4. The amino acid sequence of mouse Neu1 is depicted in SEQ ID NO: 38, and a nucleotide sequence encoding mouse Neu1 is depicted in SEQ ID NO: 42. The amino acid sequence of mouse Neu2 is depicted in SEQ ID NO: 39 and a nucleotide sequence encoding mouse Neu2 is depicted in SEQ ID NO: 43. The amino acid sequence of mouse Neu3 is depicted in SEQ ID NO: 40, and a nucleotide sequence encoding mouse Neu3 is depicted in SEQ ID NO: 44. The amino acid sequence of mouse Neu4 is depicted in SEQ ID NO: 41, and a nucleotide sequence encoding mouse Neu4 is depicted in SEQ ID NO: 45.

[0094] In certain embodiments, a sialidase portion of a sialidase-anti-HER2 fusion protein is derived from a prokaryotic sialidase. Exemplary prokaryotic sialidases include sialidases from Salmonella typhimurium and Vibrio cholera. The amino acid sequence of Salmonella typhimurium sialidase (St-sialidase) is depicted in SEQ ID NO: 30, and a nucleotide sequence encoding Salmonella typhimurium sialidase is depicted in SEQ ID NO: 6. The amino acid sequence of Vibrio cholera sialidase is depicted in SEQ ID NO: 36, and a nucleotide sequence encoding Vibrio cholera sialidase is depicted in SEQ ID NO: 37.

[0095] In certain embodiments, the sialidase portion of a sialidase-anti-HER2 fusion protein is a mutant sialidase, e.g., a recombinant mutant human sialidase. In certain embodiments, the recombinant mutant human sialidase has about 5%, about 10%, about 15%, about 20%, about 25%, about 30%, about 35%, about 40%, about 45%, about 50%, about 55%, about 60%, about 65%, about 70%, about 75%, about 80%, about 85%, about 90%, about 95%, about 100%, or more than 100% of the enzymatic activity of a corresponding (or template) wild-type human sialidase.

[0096] In certain embodiments, the recombinant mutant human sialidase has the same substrate specificity as the corresponding wild-type human sialidase. In other embodiments, the recombinant mutant human sialidase has a different substrate specificity than the corresponding wild-type human sialidase. For example, in certain embodiments the recombinant mutant human sialidase can cleave α2,3, α2,6, and/or α2,8 linkages. In certain embodiments the sialidase can cleave α2,3 and α2,8 linkages.

[0097] In certain embodiments, the expression yield of the recombinant mutant human sialidase in mammalian cells, e.g., HEK293 cells, CHO cells, murine myeloma cells (NS0, Sp2/0), or human fibrosarcoma cells (HT-1080), e.g., HEK293 cells, is greater than about 10%, about 20%, about 50%, about 75%, about 100%, about 150%, about 200%, about 250%, about 300%, about 400%, about 500%, about 600%, about 700%, about 800%, about 900%, or about 1,000% of the expression yield of the corresponding wild-type human sialidase.

[0098] In certain embodiments, the recombinant mutant human sialidase has about 5%, about 10%, about 15%, about 20%, about 25%, about 30%, about 35%, about 40%, about 45%, about 50%, about 55%, about 60%, about 65%, about 70%, about 75%, about 80%, about 85%, about 90%, about 95%, about 100%, or more than 100% of the enzymatic activity of a corresponding wild-type human sialidase, and the expression yield of the recombinant mutant human sialidase in mammalian cells, e.g., HEK293 cells, is greater than about 10%, about 20%, about 50%, about 75%, about 100%, about 150%, about 200%, about 250%, about 300%, about 400%, about 500%, about 600%, about 700%, about 800%, about 900%, or about 1,000% of the expression yield of a corresponding wild-type human sialidase.

[0099] In certain embodiments, the amino acid sequence of the recombinant mutant human sialidase has at least 50%, 55%, 60%, 65%, 70%, 75%, 80%, 85%, 90%, 95%, 96%, 97%, 98%, or 99% sequence identity to the amino acid sequence of a corresponding wild-type human sialidase.

[0100] 1. Substitution of Cysteine Residues

[0101] In certain embodiments, the recombinant mutant human sialidase comprises a substitution of at least one cysteine (cys, C) residue. It has been discovered that certain cysteine residues in sialidases may inhibit expression of functional protein as a result of protein aggregation. Accordingly, in certain embodiments, the recombinant mutant human sialidase contains at least one mutation to remove a free cysteine (e.g., for Neu1 (SEQ ID NO: 7), a mutation of, for example, one or more of C111, C117, C171, C183, C218, C240, C242, and C252; for Neu2 (SEQ ID NO: 1), a mutation of, for example, one or more of C125, C196, C219, C272, C332, and C352; for Neu3 (SEQ ID NO: 8), a mutation of, for example, one or more of C7, C90, C99, C106, C127, C136, C189, C194, C226, C242, C250, C273, C279, C295, C356, C365, C368, C384, C383, C394, and C415; and for Neu4 (SEQ ID NO: 10), a mutation of, for example, one or more of C88, C125, C126, C186, C191, C211, C223, C239, C276, C437, C453, C480, and C481). Free cysteines can be substituted with any amino acid. In certain embodiments, the free cysteine is substituted with serine (ser, S), isoleucine (iso, I), valine (val, V), phenylalanine (phe, F), leucine (leu, L), or alanine (ala, A). Exemplary cysteine substitutions in Neu2 include C125A, C125I, C125S, C125V, C196A, C196L, C196V, C272S, C272V, C332A, C332S, C332V, C352L, and C352V.

[0102] In certain embodiments, the recombinant mutant human sialidase comprises two or more cysteine substitutions. Exemplary double or triple cysteine substitutions in Neu2 include: C125S and C332S; C272V and C332A; C272V and C332S; C332A and C352L; C125S and C196L; C196L and C352L; C196L and C332A; C332A and C352L; and C196L, C332A and C352L.

[0103] In certain embodiments, the recombinant mutant human sialidase is a Neu2 sialidase and comprises the substitutions C322A and C352L (SEQ ID NO: 5).

[0104] In certain embodiments, the sialidase contains an amino acid substitution at 2, 3, 4, 5, or 6 cysteines typically present in a human sialidase, e.g., Neu2 or Neu3.

[0105] In certain embodiments, the recombinant mutant human sialidase comprises a substitution or combination of substitutions corresponding to a substitution or combination of substitutions listed in TABLE 1 (amino acid positions corresponding to wild-type human Neu2 (SEQ ID NO: 1)).

TABLE 1
Substitution(s)
C125A
C125I
C125S
C125V
C196A
C196L
Cl 96V
C272S
C272V
C332A
C332S
C332V
C352L
C352V
C125S + C332S
C272V + C332A
C272V + C332S
C332A + C352L
C125S + C196L
C196L + C352L
C196L + C332A
C196L + C332A + C352L

[0106] 2. Substitutions of Residues to Increase pI and/or Decrease Hydrophobicity

[0107] The isoelectric point (pI) of a protein is the pH at which the net charge is zero. The pI also generally indicates the pH at which the protein is least soluble, which may affect the ability to express and purify the protein. Generally, a protein has good solubility if its pI is greater than 2 units above the pH of the solution. Human Neu2 has a predicted pI of 7.5. Thus, human Neu2 is least soluble around neutral pH, which is undesirable because expression and physiological systems are at neutral pH. In contrast, the sialidase from Salmonella typhimurium (St-sialidase), which exhibits good solubility and recombinant expression, has a pI of 9.6. Accordingly, to increase expression of human Neu2 or the other human sialidases, a recombinant mutant human sialidase may be designed to contain one or more amino acid substitution(s) wherein the substitution(s) increase(s) the pI of the sialidase relative to a sialidase without the substitution. Additionally, decreasing the number of hydrophobic amino acids on the surface of a sialidase may improve expression of sialidase by, for example, reducing aggregation. Accordingly, to increase expression of human Neu2 or the other human sialidases, a recombinant mutant human sialidase may be designed to contain one or more amino acid substitution(s) wherein the substitution(s) decrease(s) the hydrophobicity of a surface of the sialidase relative to a sialidase without the substitution(s).

[0108] Accordingly, in certain embodiments, the recombinant mutant human sialidase comprises at least one amino acid substitution, wherein the substitution increases the isoelectric point (pI) of the sialidase and/or decreases the hydrophobicity of the sialidase relative to a sialidase without the substitution. This may be achieved by introducing one or more charged amino acids, for example, positively or negatively charged amino acids, into the recombinant sialidase. In certain embodiments, the amino acid substitution is to a charged amino acid, for example, a positively charged amino acid such as lysine (lys, K), histidine (his, H), or arginine (arg, R), or a negatively charged amino acid such as aspartic acid (asp, D) or glutamic acid (glu, E). In certain embodiments, the amino acid substitution is to a lysine residue. In certain embodiments, the substitution increases the pI of the sialidase to about 7.75, about 8, about 8.25, about 8.5, about 8.75, about 9, about 9.25, about 9.5, or about 9.75.

[0109] In certain embodiments, the amino acid substitution occurs at a surface exposed D or E amino acid, in a helix or loop, or in a position that has a K or R in the corresponding position of St-sialidase. In certain embodiments, the amino acid substitution occurs at an amino acid that is remote from the catalytic site or otherwise not involved in catalysis, an amino acid that is not conserved with the other human Neu proteins or with St-Sialidase or Clostridium NanH, or an amino acid that is not located in a domain important for function (e.g., an Asp-box or beta strand).

[0110] Exemplary amino acid substitutions in Neu2 that increase the isoelectric point (pI) of the sialidase and/or decrease the hydrophobicity of the sialidase relative to a sialidase without the substitution include A2E, A2K, D215K, V325E, V325K, E257K, and E319K. In certain embodiments, the recombinant mutant human sialidase comprises two or more amino acid substitutions, including, for example, A2K and V325E, A2K and V325K, E257K and V325K, A2K and E257K, and E257K and A2K and V325K.

[0111] In certain embodiments, the recombinant mutant human sialidase comprises a substitution or combination of substitutions corresponding to a substitution or combination of substitutions listed in TABLE 2 (amino acid positions corresponding to wild-type human Neu2 (SEQ ID NO: 1)).

TABLE 2
Substitution(s)
A2K
E72K
D215K
E257K
V325K
A2K + E257K
A2K + V325E
A2K + V325K
E257K + V325K

[0112] 3. Addition of N-Terminal Peptides and N- or C-Terminal Substitutions

[0113] It has been discovered that the addition of a peptide sequence of two or more amino acids to the N-terminus of a human sialidase can improve expression and/or activity of the sialidase. In certain embodiments, the peptide is at least 2 amino acids in length, for example, from 2 to 20, from 2 to 10, from 2 to 5, or 2, 3, 4, 5, 6, 7, 8, 9, 10, 11, 12, 13, 14, 15, 16, 17, 18, 19, or 20 amino acids in length. In certain embodiments, the peptide may form, or have a propensity to form, an α-helix.

[0114] In mice, a Neu2 isoform (type B) found in thymus contains six amino acids not present in the canonical isoform of Neu2 found in skeletal muscle. In certain embodiments herein, the N-terminal six amino acids of the mouse thymus Neu2 isoform, MEDLRP (SEQ ID NO: 4), or variations thereof, can be added onto a human Neu, e.g., human Neu2. In certain embodiments, the recombinant mutant human sialidase comprises a peptide at least two amino acid residues in length covalently associated with an N-terminal amino acid of the sialidase. In certain embodiments the recombinant mutant human sialidase comprises the peptide MEDLRP (SEQ ID NO: 4) or EDLRP (SEQ ID NO: 3) covalently associated with an N-terminal amino acid of the sialidase. In certain embodiments, the sialidase may further comprise a cleavage site, e.g., a proteolytic cleavage site, located between the peptide, e.g., MEDLRP (SEQ ID NO: 4) or EDLRP (SEQ ID NO: 3), and the remainder of the sialidase. In certain embodiments, the peptide, e.g., MEDLRP (SEQ ID NO: 4) or EDLRP (SEQ ID NO: 3), may be post-translationally cleaved from the remainder of the sialidase.

[0115] Alternatively to, or in combination with, the N-terminal addition, 1-5 amino acids of the 12 amino acid N-terminal region of the recombinant mutant human sialidase may be removed, e.g., the N-terminal methionine can be removed. In certain embodiments, if the recombinant mutant human sialidase is Neu2, the N-terminal methionine can be removed, the first five amino acids (MASLP; SEQ ID NO: 12) can be removed, or the second through fourth amino acids (ASLP; SEQ ID NO: 13) can be removed.

[0116] In certain embodiments, 1-5 amino acids of the 12 amino acid N-terminal region of the recombinant mutant human sialidase are substituted with MEDLRP (SEQ ID NO: 4), EDLRP (SEQ ID NO: 3), or TVEKSVVF (SEQ ID NO: 14). For example, in certain embodiments, if the recombinant mutant human sialidase is Neu2, the amino acids MASLP (SEQ ID NO: 12), ASLP (SEQ ID NO: 13) or M are substituted with MEDLRP (SEQ ID NO: 4), EDLRP (SEQ ID NO: 3) or TVEKSVVF (SEQ ID NO: 14).

[0117] Human sialidases have a β-propeller structure, characterized by 6 blade-shaped β-sheets arranged toroidally around a central axis. Generally, hydrophobic interactions between the blades of a β-propeller, including between the N- and C-terminal blades, enhance stability. Accordingly, in order to increase expression of human Neu2 or the other human sialidases, a recombinant mutant human sialidase can be designed comprising an amino acid substitution that increases hydrophobic interactions and/or hydrogen bonding between the N- and C-terminal β-propeller blades of the sialidase.

[0118] Accordingly, in certain embodiments, the recombinant mutant human sialidase comprises a substitution of at least one wild-type amino acid residue, wherein the substitution increases hydrophobic interactions and/or hydrogen bonding between the N- and C-termini of the sialidase relative to a sialidase without the substitution. In certain embodiments, the wild-type amino acid is substituted with asparagine (asn, N), lysine (lys, K), tyrosine (tyr, Y), phenylalanine (phe, F), or tryptophan (trp, W). Exemplary substitutions in Neu2 that increase hydrophobic interactions and/or hydrogen bonding between the N- and C-termini include L4N, L4K, V6Y, L7N, L4N and L7N, L4N and V6Y and L7N, V12N, V12Y, V12L, V6Y, V6F, or V6W. In certain embodiments, the sialidase comprises the V6Y substitution.

[0119] In certain embodiments, the recombinant mutant human sialidase comprises a combination of the above substitutions. For example, a recombinant mutant human Neu2 sialidase can comprise the additional amino acids MEDLRP (SEQ ID NO: 4), EDLRP (SEQ ID NO: 3), or TVEKSVVF (SEQ ID NO: 14) at the N-terminus and, in combination, can comprise at least one L4N, L4K, V6Y, L7N, L4N and L7N, L4N and V6Y and L7N, V12N, V12Y, V12L, V6Y, V6F, or V6W substitution. In certain embodiments, the amino acids MASLP (SEQ ID NO: 12), ASLP (SEQ ID NO: 13) or M of a recombinant mutant human Neu2 sialidase are replaced with MEDLRP (SEQ ID NO: 4), EDLRP (SEQ ID NO: 3) or TVEKSVVF (SEQ ID NO: 14) and the recombinant mutant human Neu2 sialidase also comprises at least one L4N, L4K, V6Y, L7N, L4N and L7N, L4N and V6Y and L7N, V12N, V12Y, V12L, V6Y, V6F, or V6W substitution.

[0120] In certain embodiments, the recombinant mutant human sialidase comprises a mutation or combination of mutations corresponding to a mutation or combination of mutations listed in TABLE 3 (amino acid positions corresponding to wild-type human Neu2 (SEQ ID NO: 1)).

TABLE 3
Mutation(s)
Substitute M at the N-terminus with EDLRP (SEQ ID NO: 3)
Substitute M at the N-terminus with MEDLRP (SEQ ID NO: 4)
Insert MEDLRP (SEQ ID NO: 4) at the N-terminus
Substitute MASLP (SEQ ID NO: 12) at the N-terminus
with MEDLRP (SEQ ID NO: 4)
L4N
V6Y
L7N
V6F
V6W

[0121] Additionally, in certain embodiments, the sialidase comprises a substitution or deletion of an N-terminal methionine at the N-terminus of the sialidase. For example, in certain embodiments, the sialidase comprises a substitution of a methionine residue at a position corresponding to position 1 of wild-type human Neu2 (SEQ ID NO: 1), e.g., the methionine at a position corresponding to position 1 of wild-type human Neu2 is substituted by alanine (M1A) or aspartic acid (M1D). In other embodiments, the sialidase comprises a deletion of a methionine residue at a position corresponding to position 1 (AM1) of wild-type human Neu2 (SEQ ID NO: 1).

[0122] In certain embodiments, the recombinant mutant human sialidase comprises a substitution or combination of substitutions corresponding to a substitution or combination of substitutions listed in TABLE 4 (amino acid positions corresponding to wild-type human Neu2 (SEQ ID NO: 1)).

TABLE 4
Mutation(s)
Deletion of M1, V6Y, I187K
M1R, V6Y, I187K
M1H, V6Y, I187K
M1K, V6Y, I187K
M1D, V6Y, I187K
M1T, V6Y, I187K
M1N, V6Y, I187K
M1Q, V6Y, I187K
M1G, V6Y, I187K
M1A, V6Y, I187K
M1V, V6Y, I187K
M1L, V6Y, I187K
M1F, V6Y, I187K
M1Y, V6Y, I187K

[0123] 4. Substitutions of Residues to Decrease Proteolytic Cleavage

[0124] It has been discovered that certain sialidases (e.g., human Neu2) are susceptible to cleavage by a protease (e.g., trypsin). As a result, proteolytic cleavage of the sialidase may occur during recombinant protein production, harvesting, purification, or formulation, during administration to a subject, or after administration to a subject. Accordingly, in certain embodiments, the recombinant mutant human sialidase comprises a substitution of at least one wild-type amino acid residue, wherein the substitution decreases cleavage of the sialidase by a protease (e.g., trypsin) relative to a sialidase without the substitution.

[0125] In certain embodiments, incubation of the recombinant mutant human sialidase with a protease (e.g., trypsin) results in from about 1% to about 50%, from about 1% to about 40%, from about 1%, to about 30%, from about 1% to about 20%, from about 1% to about 10%, from about 1% to about 5%, from about 5% to about 50%, from about 5% to about 40%, from about 5% to about 30%, from about 5% to about 20%, from about 5% to about 10%, from about 10% to about 50%, from about 10% to about 40%, from about 10% to about 30%, from about 10% to about 20%, from about 20% to about 50%, from about 20% to about 40%, from about 20% to about 30%, from about 30% to about 50%, from about 30% to about 40%, or from about 40% to about 50% of the proteolytic cleavage of a corresponding wild-type sialidase when incubated with the protease under the same conditions. In certain embodiments, incubation of the recombinant mutant human sialidase with a protease (e.g., trypsin) results in less than 50%, less than 40%, less than 30%, less than 10%, less than 5%, less than 3%, less than 1%, or less than 0.5% of the proteolytic cleavage of a corresponding wild-type sialidase when incubated with the protease under the same conditions. Proteolytic cleavage can be assayed by any method known in the art, including for example, by SDS-PAGE as described in Example 4 herein.

[0126] Exemplary substitutions that increase resistance to proteolytic cleavage include: (i) a substitution of an alanine residue at a position corresponding to position 242 of wild-type human Neu2 (SEQ ID NO: 1), e.g., a substitution by cysteine (A242C), phenylalanine (A242F), glycine (A242G), histidine (A242H), isoleucine (A242I), lysine (A242K), leucine (A242L), methionine (A242M), asparagine (A242N), glutamine (A242Q), arginine (A242R), serine (A242S), valine (A242V), tryptophan (A242W), or tyrosine (A242Y); (ii) a substitution of an arginine residue at a position corresponding to position 243 of wild-type human Neu2 (SEQ ID NO: 1), e.g., a substitution by glutamic acid (R243E), histidine (R243H), asparagine (R243N), glutamine (R243Q), or lysine (R243K); (iii) a substitution of a valine residue at a position corresponding to position 244 of wild-type human Neu2 (SEQ ID NO: 1), e.g., a substitution by isoleucine (V244I), lysine (V244K), or proline (V244P); or (iv) a combination of any of the foregoing. In certain embodiments, the recombinant mutant human sialidase comprises a substitution selected from A242C, A242F, A242Y, and A242W. In certain embodiments, the recombinant mutant human sialidase comprises a substitution or a combination of substitutions corresponding to a substitution or combination of substitutions listed in TABLE 5 (amino acid positions corresponding to wild-type human Neu2 (SEQ ID NO: 1)).

TABLE 5

| Wild Type | |
|---|---|
| Human Neu2 | |
| (SEQ ID NO: 1) | |
| Amino Acid | Exemplary Substitution(s) at Specified Position(s) |
| A242 | C, F, G, H, I, K, L, M, N, P, Q, R, S, V, W, Y |
| R243 | E, H, N, Q, K |
| V244 | I, K, P |

[0127] Additional exemplary substitutions that increase resistance to proteolytic cleavage (and/or increase expression yield and/or enzymatic activity) include: (i) a substitution of a leucine residue at a position corresponding to position 240 of wild-type human Neu2 (SEQ ID NO: 1), e.g., a substitution by aspartic acid (L240D), asparagine (L240N), or tyrosine (L240Y); (ii) a substitution of an alanine residue at a position corresponding to position 213 of wild-type human Neu2 (SEQ ID NO: 1), e.g., a substitution by cysteine (A213C), asparagine (A213N), serine (A213S), or threonine (A213T); (iii) a substitution of an arginine residue at a position corresponding to position 241 of wild-type human Neu2 (SEQ ID NO: 1), e.g., a substitution by alanine (R241A), aspartic acid (R241D), leucine (R241L), glutamine (R241Q), or tyrosine (R241Y); (iv) a substitution of a serine residue at a position corresponding to position 258 of wild-type human Neu2 (SEQ ID NO: 1), e.g., a substitution by cysteine (S258C); (v) a substitution of a leucine residue at a position corresponding to position 260 of wild-type human Neu2 (SEQ ID NO: 1), e.g., a substitution by aspartic acid (L260D), phenylalanine (L260F), glutamine (L260Q), or threonine (L260T); (vi) a substitution of a valine residue at a position corresponding to position 265 of wild-type human Neu2 (SEQ ID NO: 1), e.g., a substitution by phenylalanine (V265F); or (vii) a combination of any of the foregoing. It is contemplated that, in certain embodiments, a substitution or a combination of substitutions at these positions may improve hydrophobic and/or aromatic interaction between secondary structure elements in the sialidase (e.g., between an α-helix and the nearest β-sheet) thereby stabilizing the structure and improving resistance to proteolytic cleavage.

[0128] In certain embodiments, the recombinant mutant sialidase comprises a mutation at position L240. In certain embodiments, the recombinant mutant sialidase comprises a combination of mutations at positions (i) A213 and A242, (ii) A213, A242, and S258, (iii) L240 and L260, (iv) R241 and A242, (v) A242 and L260, (vi) A242 and V265, or (vii) L240 and A242. In certain embodiments, the recombinant mutant human sialidase comprises a combination of substitutions selected from (i) A213C, A242F, and S258C, (ii) A213C and A242F, (iii) A213T and A242F, (iv) R241Y and A242F, and (v) L240Y and A242F. In certain embodiments, the recombinant mutant human sialidase comprises a substitution or combination of substitutions corresponding to a substitution or combination of substitutions listed in TABLE 6 (amino acid positions corresponding to wild-type human Neu2 (SEQ ID NO: 1)).

TABLE 6
Substitution(s)
A242C, V244P
A242R, V244R
A242R, V244H
A242Y, V244P
A242T, V244P
A242N, V244P
A213C, A242F
A213S, A242F
A213T, A242F
A213N, A242F
A213C, A242F, S258C
A242F, L260F
A242F, V265F
L240Y
L240Y, L260F
L240D, L260T
L240N, L260T
L240N, L260D
L240N, L260Q
L240Y, A242F
R241A, A242F
R241Y, A242F

[0129] 5. Other Substitutions

[0130] In certain embodiments, the recombinant mutant human sialidase comprises at least one of the following substitutions: I187K, A328E, K370N, or H210N. In certain embodiments, a recombinant mutant human Neu2 comprises the substitution of the amino acids GDYDAPTHQVQW (SEQ ID NO: 15) with the amino acids SMDQGSTW (SEQ ID NO: 16) or STDGGKTW (SEQ ID NO: 17). In certain embodiments, a recombinant mutant human Neu2 comprises the substitution of the amino acids PRPPAPEA (SEQ ID NO: 18) with the amino acids QTPLEAAC (SEQ ID NO: 19). In certain embodiments, a recombinant mutant human Neu2 comprises the substitution of the amino acids NPRPPAPEA (SEQ ID NO: 20) with the amino acids SQNDGES (SEQ ID NO: 21).

[0131] In certain embodiments, the recombinant mutant human sialidase comprises at least one substitution at a position corresponding to V212, A213, Q214, D215, T216, L217, E218, C219, Q220, V221, A222, E223, V224, E225, or T225.

[0132] In certain embodiments, the recombinant mutant human sialidase comprises an amino acid substitution at a position identified in TABLE 7 (amino acid positions corresponding to wild-type human Neu2 (SEQ ID NO: 1). In certain embodiments, the sialidase comprises an amino acid substitution identified in TABLE 7. In certain embodiments, the sialidase comprises a combination of any amino acid substitutions identified in TABLE 7.

TABLE 7

| Wild Type | |
|---|---|
| Human Neu2 | |
| (SEQ ID NO: 1) | |
| Amino Acid | Exemplary Substitution(s) at Specified Position(s) |
| M1 | D |
| L4 | S, T, Y, L, F, A, P, V, I, N, D, or H |
| P5 | G |
| V6 | Y |
| L7 | F, Y, S, I, T, or N |
| K9 | D |
| V12 | L, A, P, V, N, D, or H |
| F13 | S, N, R, K, T, G, D, E, or A |
| I22 | S, N, R, K, T, G, D, E, A, Y, L, F, P, V, I, or H |
| A24 | S, N, R, K, T, G, D, E, A, Y, L, F, P, V, I, or H |
| L34 | S, T, Y, L, F, A, P, V, I, N, D, or H |
| A36 | S, T, Y, L, F, A, P, V, I, N, D, or H |
| K44 | R or E |
| K45 | A, E, or R |
| L54 | M |
| P62 | H, G, N, T, S, F, I, D, or E |
| H64 | F, Y, S, I, T, or N |
| Q69 | H |
| R78 | K |
| D80 | P |
| P89 | S, T, Y, L, F, A, P, V, I, N, D, H, or M |
| A93 | E or K |
| G107 | D |
| Q108 | H |
| Q112 | R or K |
| C125 | Y, F, or L |
| Q126 | E, F, H, I, L, or Y |
| A150 | V |
| T156 | R, N, D, C, G, H, I, L, F, S, Y, V, A, P, or T |
| F157 | R, N, D, C, G, H, I, L, F, S, Y, V, A, or P |
| A158 | R, N, D, C, G, H, I, L, F, S, Y, V, A, P, or T |
| V159 | R, N, D, C, G, H, I, L, F, S, Y, V, A, or P |
| G160 | R, N, D, C, G, H, I, L, F, S, Y, V, A, P, or T |
| P161 | R, N, D, C, G, H, I, L, F, S, Y, V, A, or P |
| G162 | R, N, D, C, G, H, I, L, F, S, Y, V, A, P, or T |
| H163 | R, N, D, C, G, H, I, L, F, S, Y, V, A, or P |
| C164 | R, N, D, C, G, H, I, L, F, S, Y, V, A, P, or T |
| L165 | R, N, D, C, G, H, I, L, F, S, Y, V, A, or P |
| R170 | P |
| A171 | G |
| V176 | R, N, D, C, G, H, I, L, F, S, Y, V, P, or A |
| P177 | S, T, Y, L, F, A, P, V, I, N, D, or H |
| A178 | S, T, Y, L, F, A, P, V, I, N, D, or H |
| L184 | S, N, R, K, T, G, D, E, A, F, H, I, L, P, V, or Y |
| H185 | S, N, R, K, T, G, D, E, or A |
| P186 | S, N, R, K, T, G, D, E, A, F, H, I, L, P, V, or Y |
| I187 | S, N, R, K, T, G, D, E, or A |
| Q188 | P, S, N, R, K, T, G, D, E, or A |
| R189 | P |
| P190 | F, M, A, D, G, H, N, P, R, S, or T |
| I191 | M, A, D, F, H, I, L, N, P, S, T, V, Y, E, G, K, or R |
| A194 | S, T, Y, L, F, A, P, V, I, N, D, or H |
| A213 | C, N, S, or T |
| L217 | R, N, D, C, G, H, I, L, F, S, Y, or V |
| C219 | R, N, D, C, G, H, I, L, F, S, Y, or V |
| A222 | D |
| E225 | P |
| H239 | P |
| L240 | D, N, or Y |
| R241 | A, D, L, Q, or Y |
| A242 | C, F, G, H, I, K, L, M, N, Q, R, S, V, W, or Y |
| V244 | I or P |
| T249 | A |
| D251 | G |
| E257 | P |
| S258 | C |
| L260 | D, F, Q, or T |
| V265 | F |
| Q270 | S, T, A, H, P, or F |
| G271 | S, N, R, K, T, G, D, E, or A |
| C272 | S, N, R, K, T, G, D, E, A, C, H, Y, F, H, L, P, or V |
| W292 | R |
| S301 | A, D, E, F, G, H, I, K, L, M, N, P, Q, T, V, W, Y, |
| | C, or R |
| W302 | A, D, E, F, G, H, I, L, M, N, P, Q, R, S, T, V, Y, or |
| | K |
| E319 | D |
| V325 | F, Y, S, I, T, N, A, D, H, L, P, or V |
| L326 | F, Y, S, I, T, N, A, D, H, L, P, or V |
| L327 | F, Y, S, I, T, N, A, D, H, L, P, or V |
| C332 | A, D, G, H, N, P, R, S, or T |
| Y359 | A or S |
| V363 | R, S, T, Y, L, F, A, P, V, I, N, D, or H |
| L365 | K, Q, F, Y, S, I, T, N, A, D, H, L, P, or V |

[0133] For example, in certain embodiments, the recombinant mutant human sialidase comprises: (a) a substitution of a proline residue at a position corresponding to position 5 of wild-type human Neu2 (P5); (b) a substitution of a lysine residue at a position corresponding to position 9 of wild-type human Neu2 (K9); (c) a substitution of a lysine residue at a position corresponding to position 44 of wild-type human Neu2 (K44); (d) a substitution of a lysine residue at a position corresponding to position 45 of wild-type human Neu2 (K45); (e) a substitution of a leucine residue at a position corresponding to position 54 of wild-type human Neu2 (L54); (f) a substitution of a proline residue at a position corresponding to position 62 of wild-type human Neu2 (P62); (g) a substitution of a glutamine residue at a position corresponding to position 69 of wild-type human Neu2 (Q69); (h) a substitution of an arginine residue at a position corresponding to position 78 of wild-type human Neu2 (R78); (i) a substitution of an aspartic acid residue at a position corresponding to position 80 of wild-type human Neu2 (D80); (j) a substitution of an alanine residue at a position corresponding to position 93 of wild-type human Neu2 (A93); (k) a substitution of a glycine residue at a position corresponding to position 107 of wild-type human Neu2 (G107); (l) a substitution of a glutamine residue at a position corresponding to position 108 of wild-type human Neu2 (Q108); (m) a substitution of a glutamine residue at a position corresponding to position 112 of wild-type human Neu2 (Q112); (n) a substitution of a cysteine residue at a position corresponding to position 125 of wild-type human Neu2 (C125); (o) a substitution of a glutamine residue at a position corresponding to position 126 of wild-type human Neu2 (Q126); (p) a substitution of an alanine residue at a position corresponding to position 150 of wild-type human Neu2 (A150); (q) a substitution of a cysteine residue at a position corresponding to position 164 of wild-type human Neu2 (C164); (r) a substitution of an arginine residue at a position corresponding to position 170 of wild-type human Neu2 (R170); (s) a substitution of an alanine residue at a position corresponding to position 171 of wild-type human Neu2 (A171); (t) a substitution of a glutamine residue at a position corresponding to position 188 of wild-type human Neu2 (Q188); (u) a substitution of an arginine residue at a position corresponding to position 189 of wild-type human Neu2 (R189); (v) a substitution of an alanine residue at a position corresponding to position 213 of wild-type human Neu2 (A213); (w) a substitution of a leucine residue at a position corresponding to position 217 of wild-type human Neu2 (L217); (x) a substitution of a glutamic acid residue at a position corresponding to position 225 of wild-type human Neu2 (E225); (y) a substitution of a histidine residue at a position corresponding to position 239 of wild-type human Neu2 (H239); (z) a substitution of a leucine residue at a position corresponding to position 240 of wild-type human Neu2 (L240); (aa) a substitution of an arginine residue at a position corresponding to position 241 of wild-type human Neu2 (R241); (bb) a substitution of an alanine residue at a position corresponding to position 242 of wild-type human Neu2 (A242); (cc) a substitution of a valine residue at a position corresponding to position 244 of wild-type human Neu2 (V244); (dd) a substitution of a threonine residue at a position corresponding to position 249 of wild-type human Neu2 (T249); (ee) a substitution of an aspartic acid residue at a position corresponding to position 251 of wild-type human Neu2 (D251); (ff) a substitution of a glutamic acid residue at a position corresponding to position 257 of wild-type human Neu2 (E257); (gg) a substitution of a serine residue at a position corresponding to position 258 of wild-type human Neu2 (S258); (hh) a substitution of a leucine residue at a position corresponding to position 260 of wild-type human Neu2 (L260); (ii) a substitution of a valine residue at a position corresponding to position 265 of wild-type human Neu2 (V265); (jj) a substitution of a glutamine residue at a position corresponding to position 270 of wild-type human Neu2 (Q270); (kk) a substitution of a tryptophan residue at a position corresponding to position 292 of wild-type human Neu2 (W292); (ll) a substitution of a serine residue at a position corresponding to position 301 of wild-type human Neu2 (S301); (mm) a substitution of a tryptophan residue at a position corresponding to position 302 of wild-type human Neu2 (W302); (nn) a substitution of a valine residue at a position corresponding to position 363 of wild-type human Neu2 (V363); or (oo) a substitution of a leucine residue at a position corresponding to position 365 of wild-type human Neu2 (L365); or a combination of any of the foregoing substitutions. For example, the sialidase may comprise a substitution of K9, P62, A93, Q216, A242, Q270, 5301, W302, V363, or L365, or a combination of any of the foregoing substitutions.

[0134] In certain embodiments, in the sialidase: (a) the proline residue at a position corresponding to position 5 of wild-type human Neu2 is substituted by histidine (P5H); (b) the lysine residue at a position corresponding to position 9 of wild-type human Neu2 is substituted by aspartic acid (K9D); (c) the lysine residue at a position corresponding to position 44 of wild-type human Neu2 is substituted by arginine (K44R) or glutamic acid (K44E); (d) the lysine residue at a position corresponding to position 45 of wild-type human Neu2 is substituted by alanine (K45A), arginine (K45R), or glutamic acid (K45E); (e) the leucine residue at a position corresponding to position 54 of wild-type human Neu2 is substituted by methionine (L54M); (f) the proline residue at a position corresponding to position 62 of wild-type human Neu2 is substituted by asparagine (P62N), aspartic acid (P62D), histidine (P62H), glutamic acid (P62E), glycine (P62G), serine (P62S), or threonine (P62T); (g) the glutamine residue at a position corresponding to position 69 of wild-type human Neu2 is substituted by histidine (Q69H); (h) the arginine residue at a position corresponding to position 78 of wild-type human Neu2 is substituted by lysine (R78K); (i) the aspartic acid residue at a position corresponding to position 80 of wild-type human Neu2 is substituted by proline (D80P); (j) the alanine residue at a position corresponding to position 93 of wild-type human Neu2 is substituted by glutamic acid (A93E) or lysine (A93K); (k) the glycine residue at a position corresponding to position 107 of wild-type human Neu2 is substituted by aspartic acid (G107D); (l) the glutamine residue at a position corresponding to position 108 of wild-type human Neu2 is substituted by histidine (Q108H); (m) the glutamine residue at a position corresponding to position 112 of wild-type human Neu2 is substituted by arginine (Q112R) or lysine (Q112K); (n) the cysteine residue at a position corresponding to position 125 of wild-type human Neu2 is substituted by leucine (C125L); (o) the glutamine residue at a position corresponding to position 126 of wild-type human Neu2 is substituted by leucine (Q126L), glutamic acid (Q126E), phenylalanine (Q126F), histidine (Q126H), isoleucine (Q1261), or tyrosine (Q126Y); (p) the alanine residue at a position corresponding to position 150 of wild-type human Neu2 is substituted by valine (A150V); (q) the cysteine residue at a position corresponding to position 164 of wild-type human Neu2 is substituted by glycine (C164G); (r) the arginine residue at a position corresponding to position 170 of wild-type human Neu2 is substituted by proline (R170P); (s) the alanine residue at a position corresponding to position 171 of wild-type human Neu2 is substituted by glycine (A171G); (t) the glutamine residue at a position corresponding to position 188 of wild-type human Neu2 is substituted by proline (Q188P); (u) the arginine residue at a position corresponding to position 189 of wild-type human Neu2 is substituted by proline (R189P); (v) the alanine residue at a position corresponding to position 213 of wild-type human Neu2 is substituted by cysteine (A213C), asparagine (A213N), serine (A213S), or threonine (A213T); (w) the leucine residue at a position corresponding to position 217 of wild-type human Neu2 is substituted by alanine (L217A) or valine (L217V); (x) the threonine residue at a position corresponding to position 249 of wild-type human Neu2 is substituted by alanine (T249A); (y) the aspartic acid residue at a position corresponding to position 251 of wild-type human Neu2 is substituted by glycine (D251G); (z) the glutamic acid residue at a position corresponding to position 225 of wild-type human Neu2 is substituted by proline (E225P); (aa) the histidine residue at a position corresponding to position 239 of wild-type human Neu2 is substituted by proline (H239P); (bb) the leucine residue at a position corresponding to position 240 of wild-type human Neu2 is substituted by aspartic acid (L240D), asparagine (L240N), or tyrosine (L240Y); (cc) the arginine residue at a position corresponding to position 241 of wild-type human Neu2 is substituted by alanine (R241A), aspartic acid (R241D), leucine (R241L), glutamine (R241Q), or tyrosine (R241Y); (dd) the alanine residue at a position corresponding to position 242 of wild-type human Neu2 is substituted by cysteine (A242C), phenylalanine (A242F), glycine (A242G), histidine (A242H), isoleucine (A242I), lysine (A242K), leucine (A242L), methionine (A242M), asparagine (A242N), glutamine (A242Q), arginine (A242R), serine (A242S), valine (A242V), tryptophan (A242W), or tyrosine (A242Y); (ee) the valine residue at a position corresponding to position 244 of wild-type human Neu2 is substituted by isoleucine (V244I), lysine (V244K), or proline (V244P); (ff) the glutamic acid residue at a position corresponding to position 257 of wild-type human Neu2 is substituted by proline (E257P); (gg) the serine residue at a position corresponding to position 258 is substituted by cysteine (S258C); (hh) the leucine residue at a position corresponding to position 260 of wild-type human Neu2 is substituted by aspartic acid (L260D), phenylalanine (L260F), glutamine (L260Q), or threonine (L260T); (ii) the valine residue at a position corresponding to position 265 of wild-type human Neu2 is substituted by phenylalanine (V265F); (jj) the glutamine residue at a position corresponding to position 270 of wild-type human Neu2 is substituted by alanine (Q270A), histidine (Q270H), phenylalanine (Q270F), proline (Q270P), serine (Q270S), or threonine (Q270T); (kk) the tryptophan residue at a position corresponding to position 292 of wild-type human Neu2 is substituted by arginine (W292R); (ll) the serine residue at a position corresponding to position 301 of wild-type human Neu2 is substituted by alanine (S301A), aspartic acid (S301D), glutamic acid (S301E), phenylalanine (S301F), glycine (S301G), histidine (S301H), isoleucine (S301I), lysine (S301K), leucine (S301L), methionine (S301M), asparagine (S301N), proline (S301P), glutamine (S301Q), arginine (S301R), threonine (S301T), valine (S301V), tryptophan (S301W), or tyrosine (S301Y); (mm) the tryptophan residue at a position corresponding to position 302 of wild-type human Neu2 is substituted by alanine (W302A), aspartic acid (W302D), glutamic acid (W302E), phenylalanine (W302F), glycine (W302G), histidine (W302H), isoleucine (W302I), lysine (W302K), leucine (W302L), methionine (W302M), asparagine (W302N), proline (W302P), glutamine (W302Q), arginine (W302R), serine (W302S), threonine (W302T), valine (W302V), or tyrosine (W302Y); (nn) the valine residue at a position corresponding to position 363 of wild-type human Neu2 is substituted by arginine (V363R); or (oo) the leucine residue at a position corresponding to position 365 of wild-type human Neu2 is substituted by glutamine (L365Q), histidine (L365H), isoleucine (L365I), lysine (L365K) or serine (L365S); or the sialidase comprises a combination of any of the foregoing substitutions. For example, the sialidase may comprise a substitution selected from K9D, P62G, P62N, P62S, P62T, D80P, A93E, Q126H, Q126Y, R189P, H239P, A242T, Q270A, Q270S, Q270T, S301A, S301R, W302K, W302R, V363R, and L365I, or a combination of any of the foregoing substitutions.

[0135] In certain embodiments, the recombinant mutant human sialidase comprises a deletion of a leucine residue at a position corresponding to position 184 of wild-type human Neu2 (ΔL184), a deletion of a histidine residue at a position corresponding to position 185 of wild-type human Neu2 (ΔH185), a deletion of a proline residue at a position corresponding to position 186 of wild-type human Neu2 (ΔP186), a deletion of an isoleucine residue at a position corresponding to position 187 of wild-type human Neu2 (ΔI187), and a deletion of a glutamine residue at a position corresponding to position 184 of wild-type human Neu2 (ΔQ188), or a combination of any of the foregoing deletions.

[0136] In certain embodiments, the recombinant mutant human sialidase comprises an insertion between a threonine residue at a position corresponding to position 216 of wild-type human Neu2 and a leucine residue at a position corresponding to position 217 of wild-type human Neu2, for example, an insertion of an amino acid selected from S, T, Y, L, F, A, P, V, I, N, D, and H.

[0137] Additional exemplary sialidase mutations, and combinations of sialidase mutations, are described in International (PCT) Patent Application No. PCT/US2019/012207, filed Jan. 3, 2019, including in the Detailed Description in the section entitled “I. Recombinant Human Sialidases,” and in the Examples in Examples 1, 2, 3, 4, 5, and 6.

[0138] 6. Combinations of Substitutions

[0139] In certain embodiments, the recombinant mutant human sialidase comprises a combination of any of the mutations contemplated herein. For example, the recombinant mutant sialidase enzyme may comprise a combination of 2, 3, 4, 5, 6, 7, 8, 9, 10, 11, 12, 13, 14, 15 or more of the mutations contemplated herein. It is contemplated that the recombinant mutant sialidase enzyme may comprise 1-15, 1-10, 1-7, 1-6, 1-5, 1-4, 1-3, 1-2, 2-15, 2-10, 2-7, 2-6, 2-5, 2-4, 2-3, 3-15, 3-10, 3-7, 3-6, 3-5, or 3-4 of the mutations contemplated herein.

[0140] For example, the recombinant mutant sialidase enzyme may comprise a M1 deletion (AM1), M1A substitution, M1D substitution, V6Y substitution, K9D substitution, P62G substitution, P62N substitution, P62S substitution, P62T substitution, A93E substitution, I187K substitution, Q270A substitution, S301R substitution, W302K substitution, C332A substitution, V363R substitution, L365I substitution, or a combination of any of the foregoing.

[0141] In certain embodiments, the recombinant mutant sialidase enzyme comprises a M1 deletion (AM1), M1A substitution, M1D substitution, V6Y substitution, I187K substitution, C332A substitution, or a combination of any of the foregoing. For example, the recombinant mutant sialidase enzyme may comprise a combination of mutations selected from: M1A and V6Y; M1A and I187K; M1A and C332A; M1D and V6Y; M1D and I187K; M1D and C332A; AM1 and V6Y; AM1 and 1187K; AM1 and C332A; V6Y and I187K; V6Y and C332A; I187K and C332A; M1A, V6Y, and I187K; M1A, V6Y, and C332A; M1A, I187K, and C332A; M1D, V6Y, and I187K; M1D, V6Y, and C332A; M1D, I187K, and C332A; AM1, V6Y, and I187K; AM1, V6Y, and C332A; AM1, I187K, and C332A; V6Y, I187K, and C332A; M1A, V6Y, I187K, and C332A; M1D, V6Y, I187K, and C332A; and AM1, V6Y, I187K, and C332A.

[0142] In certain embodiments, the recombinant mutant sialidase enzyme comprises (i) an amino acid substitution identified in TABLE 7, or a combination of any amino acid substitutions identified in TABLE 7, and (ii) an M1 deletion (ΔM1), M1A substitution, M1D substitution, V6Y substitution, I187K substitution, C332A substitution, or a combination of any of the foregoing. For example, the recombinant mutant sialidase enzyme may comprise (i) an amino acid substitution identified in TABLE 7, or a combination of any amino acid substitutions identified in TABLE 7, and (ii) a combination of mutations selected from: M1A and V6Y; M1A and I187K; M1A and C332A; M1D and V6Y; M1D and I187K; M1D and C332A; AM1 and V6Y; AM1 and I187K; AM1 and C332A; V6Y and I187K; V6Y and C332A; I187K and C332A; M1A, V6Y, and I187K; M1A, V6Y, and C332A; M1A, I187K, and C332A; M1D, V6Y, and I187K; M1D, V6Y, and C332A; M1D, I187K, and C332A; AM1, V6Y, and I187K; AM1, V6Y, and C332A; AM1, I187K, and C332A; V6Y, I187K, and C332A; M1A, V6Y, I187K, and C332A; M1D, V6Y, I187K, and C332A; and AM1, V6Y, I187K, and C332A.

[0143] In certain embodiments, the recombinant mutant sialidase enzyme comprises: (a) the M1D, V6Y, P62G, A93E, I187K, and C332A substitutions; (b) the M1D, V6Y, K9D, A93E, I187K, C332A, V363R, and L365I substitutions; (c) the M1D, V6Y, P62N, I187K, and C332A substitutions; (d) the M1D, V6Y, I187K, Q270A, S301R, W302K, and C332A substitutions; (e) the M1D, V6Y, P62S, I187K, Q270A, S301R, W302K, and C332A substitutions; (f) the M1D, V6Y, P62T, I187K, Q270A, S301R, W302K, and C332A substitutions; (g) the M1D, V6Y, P62N, I187K, Q270A, S301R, W302K, and C332A substitutions; (h) the M1D, V6Y, P62G, A93E, I187K, S301A, W302R, and C332A substitutions; (i) the M1D, V6Y, P62G, A93E, Q126Y, I187K, Q270T, and C332A substitutions; (j) the M1D, V6Y, P62G, A93E, Q126Y, I187K, and C332A substitutions; or (k) the M1D, V6Y, P62G, A93E, Q126Y, I187K, A242F, Q270T, and C332A substitutions.

[0144] In certain embodiments, the recombinant mutant human sialidase comprises a substitution of a serine residue at a position corresponding to position 301 of wild-type human Neu2 (S301) in combination with a substitution of a tryptophan residue at a position corresponding to position 302 of wild-type human Neu2 (W302). For example, the recombinant mutant human sialidase may comprise a combination of substitutions corresponding to a combination of substitutions listed in a row of TABLE 8 (amino acid positions corresponding to wild-type human Neu2 (SEQ ID NO: 1)). For example, the recombinant mutant human sialidase may comprise: the S301K and W302R substitutions; the S301K and W302K substitutions; or the S301A and W302S substitutions.

TABLE 8
Substitutions
S301A, W302R
S301A, W302S
S301A, W302T
S301K, W302S
S301N, W302S
S301T, W302S
S301T, W302T
S301T, W302R
S301A, W302A
S301K, W302R
S301K, W302T
S301N, W302T
S301K, W302K
S301P, W302R
S301P, W302S
S301P, W302T

[0145] In certain embodiments, the recombinant mutant human sialidase comprises a combination of substitutions corresponding to a combination of substitutions listed in a row of TABLE 9 (amino acid positions corresponding to wild-type human Neu2 (SEQ ID NO: 1)).

TABLE 9
Substitutions
M1D, V6Y, P62G, I187K, C332A
M1D, V6Y, K9D, I187K, C332A, V363R, L365I
M1D, V6Y, P62G, A93E, I187K, C332A
M1D, V6Y, K9D, I187K, C332A, V363R, L365K
M1D, V6Y, K9D, I187K, C332A, V363R, L365S
M1D, V6Y, K9D, I187K, C332A, V363R, L365Q
M1D, V6Y, K9D, I187K, C332A, V363R, L365H
M1D, V6Y, A93K, I187K, C332A
M1D, V6Y, A93E, I187K, C332A
V6Y, I187K, W292R
V6Y, G107D, I187K
V6Y, C125L
C125L, I187K
V6Y, C125L, I187K
M1D, V6Y, K45A, I187K, C332A
M1D, V6Y, Q270A, I187K, C332A
M1D, V6Y, K44R, K45R, I187K, C332A
M1D, V6Y, Q112R, I187K, C332A
M1D, V6Y, Q270F, I187K, C332A
M1D, V6Y, I187K, S301R, W302K, C332A
M1D, V6Y, K44E, K45E, I187K, C332A
M1D, V6Y, I187K, L217V, C332A
M1D, V6Y, I187K, L217A, C332A
M1D, V6Y, K44E, K45E, I187K, S301R, W302K, C332A
M1D, V6Y, Q112R, I187K, S301R, W302K, C332A
M1D, V6Y, I187K, Q270A, S301R, W302K, C332A
M1D, V6Y, K44E, K45E, Q112R, I187K, C332A
M1D, V6Y, K44E, K45E, I187K, Q270A, C332A
M1D, V6Y, K45A, I187K, Q270A, C332A
M1D, V6Y, I187K, Q270H, C332A
M1D, V6Y, I187K, Q270P, C332A
M1D, V6Y, Q112K, I187K, C332A
M1D, V6Y, P62S, I187K, Q270A, S301R, W302K, C332A
M1D, V6Y, P62T, I187K, Q270A, S301R, W302K, C332A
M1D, V6Y, P62N, I187K, Q270A, S301R, W302K, C332A
V6Y, P62H, I187K
V6Y, Q108H, I187K
M1D, V6Y, P62H, I187K, C332A
M1D, V6Y, P62G, I187K, C332A
V6Y, P62G, I187K
M1D, V6Y, P62H, I187K
M1D, V6Y, Q108H, I187K
M1D, V6Y, P62N, I187K, C332A
M1D, V6Y, P62D, I187K, C332A
M1D, V6Y, P62E, I187K, C332A
V6Y, C164G, I187K, T249A
V6Y, C164G, I187K
V6Y, Q126L, I187K D251G
V6Y, L54M, Q69H, R78K, A171G, I187K
V6Y, P62T, I187K
V6Y, A150V, I187K
P5H, V6Y, P62S, I187K
V6Y, C164G, I187K
Q126Y, Q170T
Q126Y, A242F, Q270T
M1D, V6Y, P62G, A93E, Q126E, I187K, C332A
M1D, V6Y, P62G, A93E, Q126I, I187K, C332A
M1D, V6Y, P62G, A93E, Q126L, I187K, C332A
M1D, V6Y, P62G, A93E, Q126Y, I187K, C332A
M1D, V6Y, P62G, A93E, Q126F, I187K, C332A
M1D, V6Y, P62G, A93E, Q126H, I187K, C332A
M1D, V6Y, P62G, A93E, I187K, Q270S, C332A
M1D, V6Y, P62G, A93E, I187K, Q270T, C332A
M1D, V6Y, P62G, A93E, Q126Y, I187K, Q270T, C332A
M1D, V6Y, P62G, A93E, Q126Y, I187K, A242F, Q270T, C332A
M1D, V6Y, P62G, D80P, A93E, I187K, C332A
M1D, V6Y, P62G, A93E, R170P, I187K, C332A
M1D, V6Y, P62G, A93E, I187K, Q188P, C332A
M1D, V6Y, P62G, A93E, I187K, R189P, C332A
M1D, V6Y, P62G, A93E, I187K, E225P, C332A
M1D, V6Y, P62G, A93E, I187K, H239P, C332A
M1D, V6Y, P62G, A93E, I187K, E257P, C332A
M1D, V6Y, P62G, A93E, I187K, S301A, C332A
M1D, V6Y, P62G, A93E, I187K, S301D, C332A
M1D, V6Y, P62G, A93E, I187K, S301E, C332A
M1D, V6Y, P62G, A93E, I187K, S301F, C332A
M1D, V6Y, P62G, A93E, I187K, S301H, C332A
M1D, V6Y, P62G, A93E, I187K, S301K, C332A
M1D, V6Y, P62G, A93E, I187K, S301L, C332A
M1D, V6Y, P62G, A93E, I187K, S301M, C332A
M1D, V6Y, P62G, A93E, I187K, S301N, C332A
M1D, V6Y, P62G, A93E, I187K, S301P, C332A
M1D, V6Y, P62G, A93E, I187K, S301Q, C332A
M1D, V6Y, P62G, A93E, I187K, S301R, C332A
M1D, V6Y, P62G, A93E, I187K, S301T, C332A
M1D, V6Y, P62G, A93E, I187K, S301V, C332A
M1D, V6Y, P62G, A93E, I187K, S301W, C332A
M1D, V6Y, P62G, A93E, I187K, S301Y, C332A
M1D, V6Y, P62G, A93E, I187K, W302A, C332A
M1D, V6Y, P62G, A93E, I187K, W302D, C332A
M1D, V6Y, P62G, A93E, I187K, W302F, C332A
M1D, V6Y, P62G, A93E, I187K, W302G, C332A
M1D, V6Y, P62G, A93E, I187K, W302H, C332A
M1D, V6Y, P62G, A93E, I187K, W302I, C332A
M1D, V6Y, P62G, A93E, I187K, W302L, C332A
M1D, V6Y, P62G, A93E, I187K, W302M, C332A
M1D, V6Y, P62G, A93E, I187K, W302N, C332A
M1D, V6Y, P62G, A93E, I187K, W302P, C332A
M1D, V6Y, P62G, A93E, I187K, W302Q, C332A
M1D, V6Y, P62G, A93E, I187K, W302R, C332A
M1D, V6Y, P62G, A93E, I187K, W302S, C332A
M1D, V6Y, P62G, A93E, I187K, W302T, C332A
M1D, V6Y, P62G, A93E, I187K, W302V, C332A
M1D, V6Y, P62G, A93E, I187K, W302Y, C332A
M1D, V6Y, P62G, A93E, I187K, S301A, W302A, C332A
M1D, V6Y, P62G, A93E, I187K, S301A, W302R, C332A
M1D, V6Y, P62G, A93E, I187K, S301A, W302S, C332A
M1D, V6Y, P62G, A93E, I187K, S301A, W302T, C332A
M1D, V6Y, P62G, A93E, I187K, S301K, W302S, C332A
M1D, V6Y, P62G, A93E, I187K, S301K, W302R, C332A
M1D, V6Y, P62G, A93E, I187K, S301K, W302T, C332A
M1D, V6Y, P62G, A93E, I187K, S301N, W302S, C332A
M1D, V6Y, P62G, A93E, I187K, S301N, W302T, C332A
M1D, V6Y, P62G, A93E, I187K, S301T, W302R, C332A
Q126Y, Q270T
Q126Y, A242F, Q270T

[0146] In certain embodiments, the recombinant mutant human sialidase comprises the amino acid sequence of any one of SEQ ID NOs: 48-62, 111, 114, 117, or 151, or an amino acid sequence that has at least 85%, 90%, 95%, 96%, 97%, 98%, or 99% sequence identity to any one of SEQ ID NOs: 48-62, 111, 114, 117, or 151.

[0147] In certain embodiments, the recombinant mutant human sialidase comprises the amino acid sequence of

(SEQ ID NO: 47)
X₁X₂SX₃X₄X₅LQX₆ESVFQSGAHAYRIPALLYLPGQQSLLAFAEQRASX₇
X₈DEHAELIVX₉RRGDYDAX₁₀THQVQWX₁₁AQEVVAQAX₁₂LDGHRSMNP
CPLYDX₁₃QTGTLFLFFIAIPX₁₄X₁₅VTEX₁₆QQLQTRANVTRLX₁₇X₁₈VT
STDHGRTWSSPRDLTDAAIGPX₁₉YREWSTFAVGPGHX₂₀LQLHDRX₂₁RS
LVVPAYAYRKLHPX₂₂QRPIPSAFX₂₃FLSHDHGRTWARGHFVAQDTX₂₄E
CQVAEVETGEQRVVTLNARSHLRARVQAQSX₂₅NX₂₆GLDFQX₂₇SQLVKK
LVEPPPX₂₈GX₂₉QGSVISFPSPRSGPGSPAQX₃₀LLYTHPTHX₃₁X₃₂QRA
DLGAYLNPRPPAPEAWSEPX₃₃LLAKGSX₃₄AYSDLQSMGTGPDGSPLFG
X₃₅LYEANDYEEIX₃₆FX₃₇MFTLKQAFPAEYLPQ,

wherein X₁ is Ala, Arg, Asn, Asp, Gln, Glu, Gly, His, Leu, Lys, Met, Phe, Thr, Val, or not present, X₂ is Ala or Lys, X₃ is Asn or Leu, X₄ is Pro or His, X₅ is Phe, Trp, Tyr or Val, X₆ is Lys or Asp, X₇ is Lys, Arg, or Glu. X₈ is Lys, Ala, Arg, or Glu, X₉ is Leu or Met, X₁₀ is Pro, Asn, Asp, His, Glu, Gly, Ser or Thr, X₁₁ is Gln or His, X₁₂ is Arg or Lys, X₁₃ is Ala, Glu or Lys, X₁₄ is Gly or Asp, X₁₅ is Gln or His, X₁₆ is Gln, Arg, or Lys, X₁₇ is Ala, Cys, Ile, Ser, Val, or Leu, X₁₈ is Gln or Leu, X₁₉ is Ala or Val, X₂₀ is Cys or Gly, X₂₁ is Ala or Gly, X₂₂ is Arg, Ile, or Lys, X₂₃ is Ala, Cys, Leu, or Val, X₂₄ is Leu, Ala, or Val, X₂₅ is Thr or Ala, X₂₆ is Asp or Gly, X₂₇ is Glu or Lys, X₂₈ is Gln, Ala, His, Phe, or Pro, X₂₉ is Cys or Val, X₃₀ is Trp or Arg, X₃₁ is Ser or Arg, X₃₂ is Trp or Lys, X₃₃ is Lys or Val, X₃₄ is Ala, Cys, Ser, or Val, X₃₅ is Cys, Leu, or Val, X₃₆ is Val or Arg, and X₃₇ is Leu, Gln, His, Ile, Lys, or Ser, and the sialidase comprises at least one mutation relative to wild-type human Neu2 (SEQ ID NO: 1).

[0148] In certain embodiments, the recombinant mutant human sialidase comprises the amino acid sequence of

(SEQ ID NO: 46)
X₁ASLPX₂LQX₃ESVFQSGAHAYRIPALLYLPGQQSLLAFAEQRASKKDE
HAELIVLRRGDYDAX₄THQVQWQAQEVVAQARLDGHRSMNPCPLYDX₅QT
GTLFLFFIAIPGQVTEQQQLQTRANVTRLCQVTSTDHGRTWSSPRDLTD
AAIGPAYREWSTFAVGPGHCLQLHDRARSLWPAYAYRKLHPX₆QRPIPS
AFCFLSHDHGRTWARGHFVAQDTLECQVAEVETGEQRVVTLNARSHLRA
RVQAQSTNDGLDFQESQLVKKLVEPPPX₇GCQGSVISFPSPRSGPGSPA
QWLLYTHPTHX₈X₉QRADLGAYLNPRPPAPEAWSEPVLLAKGSX₁₀AYSD
LQSMGTGPDGSPLFGCLYEANDYEEIX₁₁FX₁₂MFTLKQAFPAEYLPQ,

wherein X₁ is Ala, Arg, Asn, Asp, Gln, Glu, Gly, His, Leu, Lys, Met, Phe, Thr, Val, or not present, X₂ is Phe, Trp, Tyr or Val, X₃ is Lys or Asp, X₄ is Pro, Asn, Asp, His, Glu, Gly, Ser or Thr, X₅ is Ala, Glu, or Lys, X₆ is Arg, Ile, or Lys, X₇ is Gln, Ala, His, Phe, or Pro, X₈ is Ser or Arg, X₉ is Trp or Lys, X₁₀ is Ala, Cys, Ser, or Val, X₁₁ is Val or Arg, and X₁₂ is Leu, Gln, His, Ile, Lys, or Ser, and the sialidase comprises at least one mutation relative to wild-type human Neu2 (SEQ ID NO: 1). In certain embodiments, X₁ is Ala, Asp, Met, or not present, X₂ is Tyr or Val, X₃ is Lys or Asp, X₄ is Pro, Asn, Gly, Ser or Thr, X₅ is Ala or Glu, X₆ is Ile or Lys, X₇ is Gln or Ala, X₈ is Ser or Arg, X₉ is Trp or Lys, X₁₀ is Ala or Cys, X₁₁ is Val or Arg, and X₁₂ is Leu or Ile.

[0149] In certain embodiments, the recombinant mutant human sialidase comprises the amino acid sequence of

(SEQ ID NO: 139)
X₁X₂SX₃X₄X₅LQX₆ESVFQSGAHAYRIPALLYLPGQQSLLAFAEQRASX₇
X₈DEHAELIVX₉RRGDYDAX₁₀THQVQWX₁₁AQEVVAQAX₁₂LX₁₃GHRSMN
PCPLYDX₁₄QTGTLFLFFIAIPX₁₅X₁₆VTEX₁₇QQLQTRANVTRLX₁₈X₁₉V
TSTDHGRTWSSPRDLTDAAIGPX₂₀YREWSTFAVGPGHX₂₁LQLHDX₂₂X₂₃
RSLVVPAYAYRKLHPX₂₄X₂₅X₂₆PIPSAFX₂₇FLSHDHGRTWARGHFVX₂₈Q
DTX₂₉ECQVAEVX₃₀TGEQRVVTLNARSX₃₁X₃₂X₃₃X₃₄RX₃₅QAQSX₃₆NX₃₇G
LDFQX₃₈X₃₉QX₄₀VKKLX₄₁EPPPX₄₂GX₄₃QGSVISFPSPRSGPGSPAQX₄₄L
LYTHPTHX₄₅X₄₆QRADLGAYLNPRPPAPEAWSEPX₄₇LLAKGSX₄₈AYSDL
QSMGTGPDGSPLFGX₄₉LYEANDYEEIX₅₀FX₅₁MFTLKQAFPAEYLPQ,

wherein X₁ is Ala, Arg, Asn, Asp, Gln, Glu, Gly, His, Leu, Lys, Met, Phe, Thr, Val, or not present, X₂ is Ala or Lys, X₃ is Asn or Leu, X₄ is Pro or His, X₅ is Phe, Trp, Tyr or Val, X₆ is Lys or Asp, X₇ is Lys, Arg, or Glu, X₈ is Lys, Ala, Arg, or Glu, X₉ is Leu or Met, X₁₀ is Pro, Asn, Asp, His, Glu, Gly, Ser or Thr, X₁₁ is Gln or His, X₁₂ is Arg or Lys, X₁₃ is Asp or Pro, X₁₄ is Ala, Glu or Lys, X₁₅ is Gly or Asp, X₁₆ is Gln or His, X₁₇ is Gln, Arg, or Lys, X₁₈ is Ala, Cys, Ile, Ser, Val, or Leu, X₁₉ is Gln, Leu, Glu, Phe, His, Ile, Leu, or Tyr, X₂₀ is Ala or Val, X₂₁ is Cys or Gly, X₂₂ is Arg or Pro, X₂₃ is Ala or Gly, X₂₄ is Arg, Ile, or Lys, X₂₅ is Gln or Pro, X₂₆ is Arg or Pro, X₂₇ is Ala, Cys, Leu, or Val, X₂₈ is Ala, Cys, Asn, Ser, or Thr, X₂₉ is Leu, Ala, or Val, X₃₀ is Glu or Pro, X₃₁ is His or Pro, X₃₂ is Leu, Asp, Asn, or Tyr, X₃₃ is Arg, Ala, Asp, Leu, Gln, or Tyr, X₃₄ is Ala, Cys, Phe, Gly, His, Ile, Lys, Leu, Met, Asn, Gln, Arg, Ser, Val, Trp, or Tyr, X₃₅ is Val, Ile, or Lys, X₃₆ is Thr or Ala, X₃₇ is Asp or Gly, X₃₈ is Glu, Lys, or Pro, X₃₉ is Ser or Cys, X₄₀ is Leu, Asp, Phe, Gln, or Thr, X₄₁ is Val or Phe, X₄₂ is Gln, Ala, His, Phe, Pro, Ser, or Thr, X₄₃ is Cys or Val, X₄₄ is Trp or Arg, X₄₅ is Ser, Arg, Ala, Asp, Glu, Phe, Gly, His, Ile, Lys, Leu, Met, Asn, Pro, Gln, Thr, Val, Trp, or Tyr, X₄₆ is Trp, Lys, Ala, Asp, Glu, Phe, Gly, His, Ile, Lys, Leu, Met, Asn, Pro, Gln, Arg, Ser, Thr, Val, or Tyr, X₄₇ is Lys or Val, X₄₈ is Ala, Cys, Ser, or Val, X₄₉ is Cys, Leu, or Val, X₅₀ is Val or Arg, and X₅₁ is Leu, Gln, His, Ile, Lys, or Ser, and the sialidase comprises at least one mutation relative to wild-type human Neu2 (SEQ ID NO: 1).

[0150] In certain embodiments, the recombinant mutant human sialidase comprises the amino acid sequence of

(SEQ ID NO: 138)
X₁ASLPX₂LQX₃ESVFQSGAHAYRIPALLYLPGQQSLLAFAEQRASKKDE
HAELIVLRRGDYDAX₄THQVQWQAQEVVAQARLDGHRSMNPCPLYDX₅QT
GTLFLFFIAIPGQVTEQQQLQTRANVTRLCX₆VTSTDHGRTWSSPRDLTD
AAIGPAYREWSTFAVGPGHCLQLHDRARSLVVPAYAYRKLHPX₇QRPIPS
AFCFLSHDHGRTWARGHFVAQDTLECQVAEVETGEQRVVTLNARSHLRX₈
RVQAQSTNDGLDFQESQLVKKLVEPPPX₉GCQGSVISFPSPRSGPGSPAQ
WLLYTHPTHX₁₀X₁₁QRADLGAYLNPRPPAPEAWSEPVLLAKGSX₁₂AYSD
LQSMGTGPDGSPLFGCLYEANDYEEIX₁₃FX₁₄MFTLKQAFPAEYLPQ,

wherein X₁ is Ala, Arg, Asn, Asp, Gln, Glu, Gly, His, Leu, Lys, Met, Phe, Thr, Val, or not present, X₂ is Phe, Trp, Tyr or Val, X₃ is Lys or Asp, X₄ is Pro, Asn, Asp, His, Glu, Gly, Ser or Thr, X₅ is Ala, Glu, or Lys, X₆ is Gln, Leu, Glu, Phe, His, Ile, Leu, or Tyr, X₇ is Arg, Ile, or Lys, X₈ is Ala, Cys, Phe, Gly, His, Ile, Lys, Leu, Met, Asn, Gln, Arg, Ser, Val, Trp, or Tyr, X₉ is Gln, Ala, His, Phe, Pro, Ser, or Thr, X₁₀ is Ser, Arg, Ala, Asp, Glu, Phe, Gly, His, Ile, Lys, Leu, Met, Asn, Pro, Gln, Thr, Val, Trp, or Tyr, X₁₁ is Trp, Lys, Ala, Asp, Glu, Phe, Gly, His, Ile, Lys, Leu, Met, Asn, Pro, Gln, Arg, Ser, Thr, Val, or Tyr, X₁₂ is Ala, Cys, Ser, or Val, X₁₃ is Val or Arg, and X₁₄ is Leu, Gln, His, Ile, Lys, or Ser, and the sialidase comprises at least one mutation relative to wild-type human Neu₂ (SEQ ID NO: 1). In certain embodiments, X₁ is Ala, Asp, Met, or not present, X₂ is Tyr or Val, X₃ is Lys or Asp, X₄ is Pro, Asn, Gly, Ser or Thr, X₅ is Ala or Glu, X₆ is Gln or Tyr, X₇ is Ile or Lys, X₈ is Ala or Thr, X₉ is Gln, Ala, or Thr, X₁₀ is Ser, Arg, or Ala, X₁₁ is Trp, Lys, or Arg, X₁₂ is Ala or Cys, X₁₃ is Val or Arg, and X₁₄ is Leu or Ile.

[0151] In certain embodiments, the recombinant mutant human sialidase comprises a conservative substitution relative to a recombinant mutant human sialidase sequence disclosed herein. As used herein, the term “conservative substitution” refers to a substitution with a structurally similar amino acid. For example, conservative substitutions may include those within the following groups: Ser and Cys; Leu, Ile, and Val; Glu and Asp; Lys and Arg; Phe, Tyr, and Trp; and Gln, Asn, Glu, Asp, and His. Conservative substitutions may also be defined by the BLAST (Basic Local Alignment Search Tool) algorithm, the BLOSUM substitution matrix (e.g., BLOSUM 62 matrix), or the PAM substitution:p matrix (e.g., the PAM 250 matrix).

[0152] Sequence identity may be determined in various ways that are within the skill of a person skilled in the art, e.g., using publicly available computer software such as BLAST, BLAST-2, ALIGN or Megalign (DNASTAR) software. BLAST (Basic Local Alignment Search Tool) analysis using the algorithm employed by the programs blastp, blastn, blastx, tblastn and tblastx (Karlin et al., (1990) PROC. NATL. ACAD. SCI. USA 87:2264-2268; Altschul, (1993) J. MOL. EVOL. 36:290-300; Altschul et al., (1997) NUCLEIC ACIDS RES. 25:3389-3402, incorporated by reference herein) are tailored for sequence similarity searching. For a discussion of basic issues in searching sequence databases see Altschul et al., (1994) NATURE GENETICS 6:119-129, which is fully incorporated by reference herein. Those skilled in the art can determine appropriate parameters for measuring alignment, including any algorithms needed to achieve maximal alignment over the full length of the sequences being compared. The search parameters for histogram, descriptions, alignments, expect (i.e., the statistical significance threshold for reporting matches against database sequences), cutoff, matrix and filter are at the default settings. The default scoring matrix used by blastp, blastx, tblastn, and tblastx is the BLOSUM62 matrix (Henikoff et al., (1992) PROC. NATL. ACAD. SCI. USA 89:10915-10919, fully incorporated by reference herein). Four blastn parameters may be adjusted as follows: Q=10 (gap creation penalty); R=10 (gap extension penalty); wink=1 (generates word hits at every wink.sup.th position along the query); and gapw=16 (sets the window width within which gapped alignments are generated). The equivalent blastp parameter settings may be Q=9; R=2; wink=1; and gapw=32. Searches may also be conducted using the NCBI (National Center for Biotechnology Information) BLAST Advanced Option parameter (e.g.: -G, Cost to open gap [Integer]: default=5 for nucleotides/11 for proteins; -E, Cost to extend gap [Integer]: default=2 for nucleotides/1 for proteins; -q, Penalty for nucleotide mismatch [Integer]: default=−3; -r, reward for nucleotide match [Integer]: default=1; -e, expect value [Real]: default=10; —W, wordsize [Integer]: default=11 for nucleotides/28 for megablast/3 for proteins; -y, Dropoff (X) for blast extensions in bits: default=20 for blastn/7 for others; -X, X dropoff value for gapped alignment (in bits): default=15 for all programs, not applicable to blastn; and -Z, final X dropoff value for gapped alignment (in bits): 50 for blastn, 25 for others). ClustalW for pairwise protein alignments may also be used (default parameters may include, e.g., Blosum62 matrix and Gap Opening Penalty=10 and Gap Extension Penalty=0.1). A Bestfit comparison between sequences, available in the GCG package version 10.0, uses DNA parameters GAP=50 (gap creation penalty) and LEN=3 (gap extension penalty). The equivalent settings in Bestfit protein comparisons are GAP=8 and LEN=2.

b. Antibody Portion

[0153] As used herein, unless otherwise indicated, the term “antibody” is understood to mean an intact antibody (e.g., an intact monoclonal antibody), or a fragment thereof, such as a Fc fragment of an antibody (e.g., an Fc fragment of a monoclonal antibody), or an antigen-binding fragment of an antibody (e.g., an antigen-binding fragment of a monoclonal antibody), including an intact antibody, antigen-binding fragment, or Fc fragment that has been modified, engineered, or chemically conjugated. Examples of antigen-binding fragments include Fab, Fab′, (Fab′)₂, Fv, single chain antibodies (e.g., scFv), minibodies, and diabodies. Examples of antibodies that have been modified or engineered include chimeric antibodies, humanized antibodies, and multispecific antibodies (e.g., bispecific antibodies). An example of a chemically conjugated antibody is an antibody conjugated to a toxin moiety.

[0154] In certain embodiments, the fusion protein comprises an immunoglobulin Fc domain. As used herein, unless otherwise indicated, the term “immunoglobulin Fc domain” refers to a fragment of an immunoglobulin heavy chain constant region which, either alone or in combination with a second immunoglobulin Fc domain, is capable of binding to an Fc receptor. An immunoglobulin Fc domain may include, e.g., immunoglobulin CH2 and CH3 domains. An immunoglobulin Fc domain may include, e.g., immunoglobulin CH2 and CH3 domains and an immunoglobulin hinge region. Boundaries between immunoglobulin hinge regions, CH2, and CH3 domains are well known in the art, and can be found, e.g., in the PROSITE database (available on the world wide web at prosite.expasy.org).

[0155] In certain embodiments, the immunoglobulin Fc domain is derived from a human IgG1, IgG2, IgG3, IgG4, IgA1, IgA2, IgD, IgE, and IgM Fc domain. A single amino acid substitution (S228P according to Kabat numbering; designated IgG4Pro) may be introduced to abolish the heterogeneity observed in recombinant IgG4 antibody. See Angal, S. et al. (1993) MOL. IMMUNOL. 30:105-108.

[0156] In certain embodiments, the immunoglobulin Fc domain is derived from a human IgG1 isotype or another isotype that elicits antibody-dependent cell-mediated cytotoxicity (ADCC) and/or complement mediated cytotoxicity (CDC). In certain embodiments, the immunoglobulin Fc domain is derived from a human IgG1 isotype (e.g., SEQ ID NO: 31 or SEQ ID NO: 5).

[0157] In certain embodiments, the immunoglobulin Fc domain is derived from a human IgG4 isotype or another isotype that elicits little or no antibody-dependent cell-mediated cytotoxicity (ADCC) and/or complement mediated cytotoxicity (CDC). In certain embodiments, the immunoglobulin Fc domain is derived from a human IgG4 isotype.

[0158] In certain embodiments, the immunoglobulin Fc domain comprises either a “knob” mutation, e.g., T366Y, or a “hole” mutation, e.g., Y407T, for heterodimerization with a second polypeptide (residue numbers according to EU numbering, Kabat, E. A., et al. (1991) SEQUENCES OF PROTEINS OF IMMUNOLOGICAL INTEREST, FIFTH EDITION, U.S. Department of Health and Human Services, NIH Publication No. 91-3242).

[0159] In certain embodiments, the fusion protein comprises an immunoglobulin antigen-binding domain. The inclusion of such a domain may improve targeting of a fusion protein to a sialylated cancer cell, e.g., a HER2 expressing cancer cell, and/or to the tumor microenvironment. As used herein, unless otherwise indicated, the term “immunoglobulin antigen-binding domain” refers to a polypeptide that, alone or in combination with another immunoglobulin antigen-binding domain, defines an antigen-binding site. Exemplary immunoglobulin antigen-binding domains include, for example, immunoglobulin heavy chain variable region and an immunoglobulin light chain variable region, where the variable regions together define an antigen binding site, e.g., an anti-HER2 antigen binding site.

[0160] In certain embodiments, the immunoglobulin antigen-binding domain is derived from an anti-HER2 antibody. Exemplary anti-HER2 antibodies include trastuzumab (Herceptin®), pertuzumab (Perjeta®), CT-P6 (Herzuma®), trastuzumab-dkst (Ogivri™), MGAH22 (margetuximab), PF-05280014, ertumaxomab, gancotamab, timigutuzumab, Ontruzant, ABP-980, SB3, DS-8201, MYL-1410, BCD-022, and HD201.

[0161] In certain embodiments, the immunoglobulin antigen-binding domain is derived from trastuzumab. The trastuzumab heavy chain amino acid sequence is depicted in SEQ ID NO: 63, and the trastuzumab light chain amino acid sequence is depicted in SEQ ID NO: 64. The amino acid sequence of an exemplary scFv derived from trastuzumab is depicted in SEQ ID NO: 65.

c. Linker

[0162] In certain embodiments, the sialidase portion of the fusion protein can be linked or fused directly to the anti-HER2 antibody portion (e.g., immunoglobulin Fc domain and/or immunoglobulin antigen-binding domain) of the fusion protein. In other embodiments, the sialidase portion can be covalently bound to the anti-HER2 antibody portion by a linker.

[0163] The linker may couple, with one or more natural amino acids, the sialidase, or functional fragment thereof, and the antibody portions or fragments, where the amino acid (for example, a cysteine amino acid) may be introduced by site-directed mutagenesis. The linker may include one or more unnatural amino acids. It is contemplated that, in certain circumstances, a linker containing for example, one or more sulfhydryl reactive groups (e.g., a maleimide) may covalently link a cysteine in the sialidase portion or the antibody portion that is a naturally occurring cysteine residue or is the product of site-specific mutagenesis.

[0164] The linker may be a cleavable linker or a non-cleavable linker. Optionally or in addition, the linker may be a flexible linker or an inflexible linker.

[0165] The linker should be a length sufficiently long to allow the sialidase and the antibody portions to be linked without steric hindrance from one another and sufficiently short to retain the intended activity of the fusion protein. The linker preferably is sufficiently hydrophilic to avoid or minimize instability of the fusion protein. The linker preferably is sufficiently hydrophilic to avoid or minimize insolubility of the fusion protein. The linker should be sufficiently stable in vivo (e.g., it is not cleaved by serum, enzymes, etc.) to permit the fusion protein to be operative in vivo.

[0166] The linker may be from about 1 angstroms (Å) to about 150 Å in length, or from about 1 Å to about 120 Å in length, or from about 5 Å to about 110 Å in length, or from about 10 Å to about 100 Å in length. The linker may be greater than about 2, 3, 4, 5, 6, 7, 8, 9, 10, 11, 12, 13, 14, 15, 16, 17, 18, 19, 20, 25, 27, 30 or greater angstroms in length and/or less than about 110, 100, 90, 85, 80, 75, 70, 65, 60, 55, 50, 45, 43, 42, 41, 40, 39, 38, 37, 36, 35, 34, 33, 32, 31, or fewer Å in length. Furthermore, the linker may be about 5, 10, 15, 20, 25, 30, 35, 40, 45, 50, 55, 60, 65, 70, 75, 80, 85, 90, 95, 100, 110, and 120 Å in length.

[0167] In certain embodiments, the linker comprises a polypeptide linker that connects or fuses the sialidase portion of the fusion protein to the anti-HER2 antibody portion (e.g., immunoglobulin Fc domain and/or immunoglobulin antigen-binding domain) of the fusion protein. For example, it is contemplated that a gene encoding a sialidase portion linked directly or indirectly (for example, via an amino acid containing linker) to an antibody portion can be created and expressed using conventional recombinant DNA technologies. For example, the amino terminus of a sialidase portion can be linked to the carboxy terminus of either the light or the heavy chain of an antibody portion. For example, for a Fab fragment, the amino terminus or carboxy terminus of the sialidase can be linked to the first constant domain of the heavy antibody chain (CH1). When a linker is employed, the linker may comprise hydrophilic amino acid residues, such as Gln, Ser, Gly, Glu, Pro, His and Arg. In certain embodiments, the linker is a peptide containing 1-25 amino acid residues, 1-20 amino acid residues, 2-15 amino acid residues, 3-10 amino acid residues, 3-7 amino acid residues, 4-25 amino acid residues, 4-20 amino acid residues, 4-15 amino acid residues, 4-10 amino acid residues, 5-25 amino acid residues, 5-20 amino acid residues, 5-15 amino acid residues, or 5-10 amino acid residues. Exemplary linkers include glycine and serine-rich linkers, e.g., (GlyGlyPro)ₙ, or (GlyGlyGlyGlySer)ₙ, where n is 1-5. In certain embodiments, the linker comprises, consists, or consists essentially of GGGGS (SEQ ID NO: 140). In certain embodiments, the linker comprises, consists, or consists essentially of GGGGSGGGGS (SEQ ID NO: 107). In certain embodiments, the linker comprises, consists, or consists essentially of EPKSS (SEQ ID NO: 108). Additional exemplary linker sequences are disclosed, e.g., in George et al. (2003) PROTEIN ENGINEERING 15:871-879, and U.S. Pat. Nos. 5,482,858 and 5,525,491.

[0168] In certain embodiments, the fusion protein comprises the amino acid sequence of any one of SEQ ID NOs: 66-85, 98-106, 112, 113, 115, 116, 118, 119, 122-134, 141, 143, 145, 147, or 152-155, or an amino acid sequence that has at least 85%, 90%, 95%, 96%, 97%, 98%, or 99% sequence identity to any one of SEQ ID NOs: 66-85, 98-106, 112, 113, 115, 116, 118, 119, 122-134, 141, 143, 145, 147, or 152-155.

d. Antibody Conjugates

[0169] The invention further provides antibody conjugates containing one or more of the fusion proteins disclosed herein. As used herein, unless otherwise indicated, the term “antibody conjugate” is understood to refer to an antibody, or a functional fragment thereof, that comprises antigen-binding activity (e.g., anti-HER2 antigen-binding activity) and/or Fc receptor-binding activity, conjugated (e.g., covalently coupled) to an additional functional moiety. In certain embodiments, the antibody or functional antibody fragment is conjugated to a sialidase enzyme, e.g., a recombinant mutant human sialidase enzyme disclosed herein. In certain embodiments, an antibody conjugate comprises a single polypeptide chain. In certain embodiments, an antibody conjugate comprises two, three, four, or more polypeptide chains that are covalently or non-covalently associated together to produce a multimeric complex, e.g., a dimeric, trimeric or tetrameric complex. For example, an antibody conjugate may comprise a first polypeptide (fusion protein) comprising a recombinant mutant human sialidase enzyme and an immunoglobulin heavy chain, and a second polypeptide comprising an immunoglobulin light chain, where, for example, the immunoglobulin heavy and light chains together define a single antigen-binding site, e.g., an anti-HER2 antigen-binding site.

[0170] In certain embodiments, the antibody conjugate can include a single sialidase. In other embodiments, the antibody conjugate can include more than one (e.g., two) sialidases. If more than one sialidase is included, the sialidases can be the same or different. In certain embodiments, the antibody conjugate can include a single anti-HER2 antigen-binding site. In other embodiments, the antibody conjugate can include more than one (e.g., two) anti-HER2 antigen-binding sites. If two antigen-binding sites are used, they can be the same or different. In certain embodiments, the antibody conjugate comprises an immunoglobulin Fc fragment.

[0171] In certain embodiments, the antibody conjugate comprises one or two immunoglobulin heavy chains, or a functional fragment thereof. In certain embodiments, the antibody conjugate comprises one or two immunoglobulin light chains, or a functional fragment thereof. In certain embodiments, the antibody conjugate comprises a sialidase fused to the N- or C-terminus of an immunoglobulin heavy chain or an immunoglobulin light chain.

[0172] FIG. 17 depicts exemplary antibody conjugate constructs containing one or more sialidase enzymes. For example, in FIG. 17A, a first anti-HER2 antigen-binding site is depicted as 10, a second anti-HER2 antigen-binding site is depicted as 20, a sialidase is depicted as 30, and a Fab is depicted as 40. In each of the constructs depicted in FIGS. 17A-17I it is understood that the Fc may optionally be modified in some manner, e.g. using Knobs-into-Holes type technology, e.g., as depicted by 50 in FIG. 17B. Throughout FIG. 17 similar structures are depicted by similar schematic representations.

[0173] FIG. 17A depicts antibody conjugate constructs comprising a first polypeptide comprising a first immunoglobulin light chain; a second polypeptide comprising a first immunoglobulin heavy chain; a third polypeptide comprising a second immunoglobulin heavy chain; and a fourth polypeptide comprising a second immunoglobulin light chain. The first and second polypeptides can be covalently linked together, the third and fourth polypeptides can be covalently linked together, and the second and third polypeptides can be covalently linked together. The covalent linkages can be disulfide bonds. In certain embodiments, the first polypeptide and the second polypeptide together define a first anti-HER2 antigen-binding site as depicted as 10, and the third polypeptide and the fourth polypeptide together define a second anti-HER2 antigen-binding site as depicted as 20. A sialidase enzyme as depicted as 30 can be conjugated to the N- or C-terminus of the first and second immunoglobulin light chain or the first and second immunoglobulin heavy chain.

[0174] FIG. 17B depicts antibody conjugate constructs comprising a first polypeptide comprising a first immunoglobulin light chain; a second polypeptide comprising a first immunoglobulin heavy chain; a third polypeptide comprising a second immunoglobulin heavy chain; and a fourth polypeptide comprising a second immunoglobulin light chain. The first and second polypeptides can be covalently linked together, the third and fourth polypeptides can be covalently linked together, and the second and third polypeptides can be covalently linked together. The covalent linkages can be disulfide bonds. In certain embodiments, the first polypeptide and the second polypeptide together define a first anti-HER2 antigen-binding site, and the third polypeptide and the fourth polypeptide together define a second anti-HER2 antigen-binding site. A sialidase enzyme can be conjugated to the N- or C-terminus of the first immunoglobulin light chain or the first immunoglobulin heavy chain.

[0175] FIG. 17C depicts antibody conjugate constructs comprising a first polypeptide comprising an immunoglobulin light chain; a second polypeptide comprising an immunoglobulin heavy chain; and a third polypeptide comprising an immunoglobulin Fc domain. The first and second polypeptides can be covalently linked together and the second and third polypeptides can be covalently linked together. The covalent linkages can be disulfide bonds. In certain embodiments, the first polypeptide and the second polypeptide together define an anti-HER2 antigen-binding site. A sialidase enzyme can be conjugated to the N- or C-terminus of the first immunoglobulin light chain or the first immunoglobulin heavy chain.

[0176] FIG. 17D depicts antibody conjugate constructs comprising a first polypeptide comprising an immunoglobulin light chain; a second polypeptide comprising an immunoglobulin heavy chain; and a third polypeptide comprising an immunoglobulin Fc domain and a first sialidase enzyme. The first and second polypeptides can be covalently linked together and the second and third polypeptides can be covalently linked together. The covalent linkages can be disulfide bonds. The third polypeptide comprises the sialidase and the immunoglobulin Fc domain in an N- to C-terminal orientation. In certain embodiments, the first polypeptide and the second polypeptide together define an anti-HER2 antigen-binding site. An optional second sialidase enzyme can be conjugated to the N- or C-terminus of the first immunoglobulin light chain or the first immunoglobulin heavy chain.

[0177] FIG. 17E depicts antibody conjugate constructs comprising a first polypeptide comprising an immunoglobulin light chain; a second polypeptide comprising an immunoglobulin heavy chain; and a third polypeptide comprising an immunoglobulin Fc domain and a first sialidase enzyme. The first and second polypeptides can be covalently linked together and the second and third polypeptides can be covalently linked together. The covalent linkages can be disulfide bonds. The third polypeptide comprises the immunoglobulin Fc domain and the sialidase in an N- to C-terminal orientation. In certain embodiments, the first polypeptide and the second polypeptide together define an anti-HER2 antigen-binding site. An optional second sialidase enzyme can be conjugated to the N- or C-terminus of the first immunoglobulin light chain or the first immunoglobulin heavy chain.

[0178] FIG. 17F depicts antibody conjugate constructs comprising a first polypeptide comprising a first immunoglobulin Fc domain, and a second polypeptide comprising a second immunoglobulin Fc domain. The first and second polypeptides can be covalently linked together. The covalent linkages can be disulfide bonds. A sialidase enzyme can be conjugated to the N- or C-terminus of the first immunoglobulin Fc domain or to the N- or C-terminus of the second immunoglobulin Fc domain. An optional second sialidase enzyme can be conjugated to the N- or C-terminus of the first immunoglobulin Fc domain or to the N- or C-terminus of the second immunoglobulin Fc domain.

[0179] FIG. 17G depicts antibody conjugate constructs comprising a first polypeptide comprising an immunoglobulin light chain; and a second polypeptide comprising an immunoglobulin heavy chain variable region. The first and second polypeptides can be covalently linked together. The covalent linkages can be disulfide bonds. In certain embodiments, the first polypeptide and the second polypeptide together define an anti-HER2 antigen-binding site. The sialidase enzyme can be conjugated to the N- or C-terminus of the immunoglobulin light chain or the immunoglobulin heavy chain variable region.

[0180] FIG. 17H depicts antibody conjugate constructs comprising a first polypeptide comprising a first immunoglobulin Fc domain, and a second polypeptide comprising a second immunoglobulin Fc domain. The first and second polypeptides can be covalently linked together. The covalent linkages can be disulfide bonds. A sialidase enzyme can be conjugated to the N-terminus of the first immunoglobulin Fc domain or the second immunoglobulin Fc domain. An optional second sialidase enzyme can be conjugated to the N-terminus of the second immunoglobulin Fc domain or the first immunoglobulin Fc domain, respectively. A single chain variable fragment (scFv) can be conjugated to the C-terminus of the first immunoglobulin Fc domain or the second immunoglobulin Fc domain. An optional second single chain variable fragment (scFv) can be conjugated to the C-terminus of the first immunoglobulin Fc domain or the second immunoglobulin Fc domain, respectively.

[0181] FIG. 17I depicts antibody conjugate constructs similar to those depicted in FIG. 17H except that each scFv is replaced with an immunoglobulin antigen binding fragment, e.g., an Fab. For example, FIG. 17I depicts antibody conjugate constructs comprising a first polypeptide comprising a first immunoglobulin Fc domain, and a second polypeptide comprising a second immunoglobulin Fc domain. The first and second polypeptides can be covalently linked together. The covalent linkages can be disulfide bonds. A sialidase enzyme can be conjugated to the N-terminus of the first immunoglobulin Fc domain or the second immunoglobulin Fc domain. An optional second sialidase enzyme can be conjugated to the N-terminus of the second immunoglobulin Fc domain or the first immunoglobulin Fc domain, respectively. An antibody fragment (Fab) can be conjugated or fused to the C-terminus of the first immunoglobulin Fc domain or the second immunoglobulin Fc domain. An optional second antibody fragment (Fab) can be conjugated or fused to the C-terminus of the second immunoglobulin Fc domain or the first immunoglobulin Fc domain, respectively. In the case of a fusion, the C terminus of the Fc domain is linked (either by a bond or an amino acid linker) to a first polypeptide chain defining an anti-HER2 immunoglobulin antigen binding fragment. In the case of antibodies that have an antigen binding site defined by a single variable region, then this may be sufficient to impart binding affinity to a target antigen, e.g., HER2. In other instances, e.g., in the case of a human antibody, the first polypeptide chain defining an immunoglobulin antigen binding fragment can be conjugated (e.g., covalently conjugated, e.g., via a disulfide bond) to a second polypeptide chain defining an immunoglobulin antigen binding fragment, there the two antigen binding fragments together define an antigen binding site for binding the target antigen, e.g., HER2.

[0182] FIG. 18 depicts additional antibody conjugate constructs. For example, FIG. 18 depicts an antibody conjugate construct comprising a first polypeptide comprising an immunoglobulin light chain; a second polypeptide comprising an immunoglobulin heavy chain and an scFv; and a third polypeptide comprising an immunoglobulin Fc domain and a first sialidase enzyme. The first and second polypeptides can be covalently linked together and the second and third polypeptides can be covalently linked together. The covalent linkages can be disulfide bonds. The second polypeptide comprises the heavy chain and the scFv in an N- to C-terminal orientation. The third polypeptide comprises the sialidase and the immunoglobulin Fc domain in an N- to C-terminal orientation. In certain embodiments, the first polypeptide and the second polypeptide together define a first antigen-binding site. In certain embodiments, the scFv defines a second antigen-binding site. FIG. 18 depicts an additional antibody construct comprising a first polypeptide comprising an immunoglobulin light chain; a second polypeptide comprising an immunoglobulin heavy chain; and a third polypeptide comprising an immunoglobulin Fc domain and a first sialidase enzyme, wherein a Fab fragment is conjugated to the N-terminus of the immunoglobulin heavy chain. The first and second polypeptides can be covalently linked together and the second and third polypeptides can be covalently linked together. The covalent linkages can be disulfide bonds. The third polypeptide comprises the sialidase and the immunoglobulin Fc domain in an N- to C-terminal orientation. In certain embodiments, the first polypeptide and the second polypeptide together define a first antigen-binding site. In certain embodiments, the Fab fragment defines a second antigen-binding site. In each of the constructs depicted in FIG. 18 it is understood that an scFv, when present, may be replaced with a Fab fragment, or a Fab fragment, when present, may be replaced with an scFv. In each of the constructs depicted in FIG. 18, it is understood that the Fc may optionally be modified in some manner.

[0183] In certain embodiments, the antibody conjugate comprises a first polypeptide comprising a first immunoglobulin light chain; a second polypeptide comprising a first immunoglobulin heavy chain and a first sialidase; a third polypeptide comprising a second immunoglobulin heavy chain and a second sialidase; and a fourth polypeptide comprising a second immunoglobulin light chain. An example of this embodiment is shown in FIG. 19A. The first and second polypeptides can be covalently linked together, the third and fourth polypeptides can be covalently linked together, and the second and third polypeptides can be covalently linked together. The covalent linkages can be disulfide bonds. In certain embodiments, the first polypeptide and the second polypeptide together define a first anti-HER2 antigen-binding site, and the third polypeptide and the fourth polypeptide together define a second anti-HER2 antigen-binding site. In certain embodiments, the second and third polypeptides comprise the first and second immunoglobulin heavy chain and the first and second sialidase, respectively, in an N- to C-terminal orientation. In certain embodiments, the second and third polypeptides comprise the first and second sialidase and the first and second immunoglobulin heavy chain, respectively, in an N- to C-terminal orientation.

[0184] In certain embodiments, the antibody conjugate comprises a first polypeptide comprising an immunoglobulin light chain; a second polypeptide comprising an immunoglobulin heavy chain; and a third polypeptide comprising an immunoglobulin Fc domain and a sialidase. An example of this embodiment is shown in FIG. 19B. The first and second polypeptides can be covalently linked together and the second and third polypeptides can be covalently linked together. The covalent linkages can be disulfide bonds. In certain embodiments, the first polypeptide and the second polypeptide together define an anti-HER2 antigen-binding site. In certain embodiments, the third polypeptide comprises the sialidase and the immunoglobulin Fc domain in an N- to C-terminal orientation, or the immunoglobulin Fc domain and the sialidase in an N- to C-terminal orientation.

[0185] In certain embodiments, the first polypeptide comprises the amino acid sequence of SEQ ID NO: 66, or an amino acid sequence that has at least 85%, 90%, 95%, 96%, 97%, 98%, or 99% sequence identity to SEQ ID NO: 66. In certain embodiments, the second polypeptide comprises the amino acid sequence of any one of SEQ ID NOs: 67 or 149, or an amino acid sequence that has at least 85%, 90%, 95%, 96%, 97%, 98%, or 99% sequence identity to any one of SEQ ID NOs: 67 or 149. In certain embodiments, the third polypeptide comprises the amino acid sequence of any one of SEQ ID NOs: 68-74, 98-104, 112, 113, 115, 116, 118, 119, 141, 143, 145, 147, 152, or 154, or an amino acid sequence that has at least 85%, 90%, 95%, 96%, 97%, 98%, or 99% sequence identity to any one of SEQ ID NOs: 68-74, 98-104, 112, 113, 115, 116, 118, 119, 141, 143, 145, 147, 152, or 154.

[0186] In certain embodiments, the third polypeptide comprises the amino acid sequence of

(SEQ ID NO: 76)
X₁X₂SX₃X₄X₅LQX₆ESVFQSGAHAYRIPALLYLPGQQSLLAFAEQRASX₇
X₈DEHAELIVX₉RRGDYDAX₁₀THQVQWX₁₁AQEVVAQAX₁₂LDGHRSMNP
CPLYDX₁₃QTGTLFLFFIAIPX₁₄X₁₅VTEX₁₆QQLQTRANVTRLX₁₇X₁₈V
TSTDHGRTWSSPRDLTDAAIGPX₁₉YREWSTFAVGPGHX₂₀LQLHDRX₂₁
RSLVVPAYAYRKLHPX₂₂QRPIPSAFX₂₃FLSHDHGRTWARGHFVAQDT
X₂₄ECQVAEVETGEQRVVTLNARSHLRARVQAQSX₂₅NX₂₆GLDFQX₂₇SQ
LVKKLVEPPPX₂₈GX₂₉QGSVISFPSPRSGPGSPAQX₃₀LLYTHPTHX₃₁
X₃₂QRADLGAYLNPRPPAPEAWSEPX₃₃LLAKGSX₃₄AYSDLQSMGTGPD
GSPLFGX₃₅LYEANDYEEIX₃₆FX₃₇MFTLKQAFPAEYLPQGGGGSGGGG
SDKTHTCPPCPAPELLGGPSVFLFPPKPKDTLMISRTPEVTCVVVDVS
HEDPEVKFNWYVDGVEVHNAKTKPREEQYNSTYRVVSVLTVLHQDWLN
GKEYKCKVSNKALPAPIEKTISKAKGQPREPQVYTLPPSREEMTKNQV
SLTCLVKGFYPSDIAVEWESNGQPENNYKTTPPVLDSDGSFFLTSKLT
VDKSRWQQGNVFSCSVMHEALHNHYTQKSLSLSPGK,

wherein X₁ is Ala, Arg, Asn, Asp, Gln, Glu, Gly, His, Leu, Lys, Met, Phe, Thr, Val, or not present, X₂ is Ala or Lys, X₃ is Asn or Leu, X₄ is Pro or His, X₅ is Phe, Trp, Tyr or Val, X₆ is Lys or Asp, X₇ is Lys, Arg, or Glu. X₈ is Lys, Ala, Arg, or Glu, X₉ is Leu or Met, X₁₀ is Pro, Asn, Asp, His, Glu, Gly, Ser or Thr, X₁₁ is Gln or His, X₁₂ is Arg or Lys, X₁₃ is Ala, Glu or Lys, X₁₄ is Gly or Asp, X₁₅ is Gln or His, X₁₆ is Gln, Arg, or Lys, X₁₇ is Ala, Cys, Ile, Ser, Val, or Leu, X₁₈ is Gln or Leu, X₁₉ is Ala or Val, X₂₀ is Cys or Gly, X₂₁ is Ala or Gly, X₂₂ is Arg, Ile, or Lys, X₂₃ is Ala, Cys, Leu, or Val, X₂₄ is Leu, Ala, or Val, X₂₅ is Thr or Ala, X₂₆ is Asp or Gly, X₂₇ is Glu or Lys, X₂₈ is Gln, Ala, His, Phe, or Pro, X₂₉ is Cys or Val, X₃₀ is Trp or Arg, X₃₁ is Ser or Arg, X₃₂ is Trp or Lys, X₃₃ is Lys or Val, X₃₄ is Ala, Cys, Ser, or Val, X₃₅ is Cys, Leu, or Val, X₃₆ is Val or Arg, and X₃₇ is Leu, Gln, His, Ile, Lys, or Ser, and the sialidase comprises at least one mutation relative to wild-type human Neu2 (SEQ ID NO: 1).

[0187] In certain embodiments, the third polypeptide comprises the amino acid sequence of

(SEQ ID NO: 75)
X₁ASLPX₂LQX₃ESVFQSGAHAYRIPALLYLPGQQSLLAFAEQRASKKDE
HAELIVLRRGDYDAX₄THQVQWQAQEVVAQARLDGHRSMNPCPLYDX₅QT
GTLFLFFIAIPGQVTEQQQLQTRANVTRLCQVTSTDHGRTWSSPRDLTD
AAIGPAYREWSTFAVGPGHCLQLHDRARSLWPAYAYRKLHPX₆QRPIPS
AFCFLSHDHGRTWARGHFVAQDTLECQVAEVETGGEQRVVTLNARSHLR
ARVQAQSTNDGLDFQESQLVKKLVEPPPX₇GCQGSVISFPSPRSGPGSP
AQWLLYTHPTHX₈X₉QRADLGAYLNPRPPAPEAWSEPVLLAKGSX₁₀AYS
DLQSMGTGPDGSPLFGCLYEANDYEEIX₁₁FX₁₂MFTLKQAFPAEYLPQG
GGGSGGGGSDKTHTCPPCPAPELLGGPSVFLFPPKPKDTLMISRTPEV
TCVVVDVSHEDPEVKFNWYVDGVEVHNAKTKPREEQYNSTYRVVSVLT
VLHQDWLNGKEYKCKVSNKALPAPIEKTISKAKGQPREPQVYTLPPSR
EEMTKNQVSLTCLVKGFYPSDIAVEWESNGQPENNYKTTPPVLDSDGS
FFLTSKLTVDKSRWQQGNVFSCSVMHEALHNHYTQKSLSLSPGK,

wherein X₁ is Ala, Arg, Asn, Asp, Gln, Glu, Gly, His, Leu, Lys, Met, Phe, Thr, Val, or not present, X₂ is Phe, Trp, Tyr or Val, X₃ is Lys or Asp, X₄ is Pro, Asn, Asp, His, Glu, Gly, Ser or Thr, X₅ is Ala, Glu, or Lys, X₆ is Arg, Ile, or Lys, X₇ is Gln, Ala, His, Phe, or Pro, X₈ is Ser or Arg, X₉ is Trp or Lys, X₁₀ is Ala, Cys, Ser, or Val, X₁₁ is Val or Arg, and X₁₂ is Leu, Gln, His, Ile, Lys, or Ser, and the sialidase comprises at least one mutation relative to wild-type human Neu2 (SEQ ID NO: 1). In certain embodiments, X₁ is Ala, Asp, Met, or not present, X₂ is Tyr or Val, X₃ is Lys or Asp, X₄ is Pro, Asn, Gly, Ser or Thr, X₅ is Ala or Glu, X₆ is Ile or Lys, X₇ is Gln or Ala, X₈ is Ser or Arg, X₉ is Trp or Lys, X₁₀ is Ala or Cys, X₁₁ is Val or Arg, and X₁₂ is Leu or Ile.

[0188] In certain embodiments, the third polypeptide comprises the amino acid sequence of

(SEQ ID NO: 106)
X₁X₂SX₃X₄X₅LQX₆ESVFQSGAHAYRIPALLYLPGQQSLLAFAEQRASX₇
X₈DEHAELIVX₉RRGDYDAX₁₀THQVQWX₁₁AQEVVAQAX₁₂LDGHRSMNP
CPLYDX₁₃QTGTLFLFFIAIPX₁₄X₁₅VTEX₁₆QQLQTRANVTRLX₁₇X₁₈V
TSTDHGRTWSSPRDLTDAAIGPX₁₉YREWSTFAVGPGHX₂₀LQLHDRX₂₁R
SLVVPAYAYRKLHPX₂₂QRPIPSAFX₂₃FLSHDHGRTWARGHFVAQDTX₂₄
ECQVAEVETGEQRVVTLNARSHLRARVQAQSX₂₅NX₂₆GLDFQX₂₇SQLVK
KLVEPPPX₂₈GX₂₉QGSVISFPSPRSGPGSPAQX₃₀LLYTHPTHX₃₁X₃₂QRA
DLGAYLNPRPPAPEAWSEPX₃₃LLAKGSX₃₄AYSDLQSMGTGPDGSPLFG
X₃₅LYEANDYEEIX₃₆FX₃₇MFTLKQAFPAEYLPQX₃₈DKTHTCPPCPAPE
LLGGPSVELEPPKPKDTLMISRTPEVTCVVVDVSHEDPEVKENWYVDG
VEVHNAKTKPREEQYNSTYRVVSVLTVLHQDWLNGKEYKCKVSNKALPA
PIEKTISKAKGQPREPQVYTLPPSREEMTKNQVSLTCLVKGFYPSDIAV
EWESNGQPENNYKTTPPVLDSDGSFFLTSKLTVDKSRWQQGNVFSCSVM
HEALHNHYTQKSLSLSPGK,

wherein X₁ is Ala, Arg, Asn, Asp, Gln, Glu, Gly, His, Leu, Lys, Met, Phe, Thr, Val, or not present, X₂ is Ala or Lys, X₃ is Asn or Leu, X₄ is Pro or His, X₅ is Phe, Trp, Tyr or Val, X₆ is Lys or Asp, X₇ is Lys, Arg, or Glu. X₈ is Lys, Ala, Arg, or Glu, X₉ is Leu or Met, X₁₀ is Pro, Asn, Asp, His, Glu, Gly, Ser or Thr, X₁₁ is Gln or His, X₁₂ is Arg or Lys, X₁₃ is Ala, Glu or Lys, X₁₄ is Gly or Asp, X₁₅ is Gln or His, X₁₆ is Gln, Arg, or Lys, X₁₇ is Ala, Cys, Ile, Ser, Val, or Leu, X₁₈ is Gln or Leu, X₁₉ is Ala or Val, X₂₀ is Cys or Gly, X₂₁ is Ala or Gly, X₂₂ is Arg, Ile, or Lys, X₂₃ is Ala, Cys, Leu, or Val, X₂₄ is Leu, Ala, or Val, X₂₅ is Thr or Ala, X₂₆ is Asp or Gly, X₂₇ is Glu or Lys, X₂₈ is Gln, Ala, His, Phe, or Pro, X₂₉ is Cys or Val, X₃₀ is Trp or Arg, X₃₁ is Ser or Arg, X₃₂ is Trp or Lys, X₃₃ is Lys or Val, X₃₄ is Ala, Cys, Ser, or Val, X₃₅ is Cys, Leu, or Val, X₃₆ is Val or Arg, X₃₇ is Leu, Gln, His, Ile, Lys, or Ser, and X₃₈ is GGGGSGGGGS (SEQ ID NO: 107) or EPKSS (SEQ ID NO: 108), and the sialidase comprises at least one mutation relative to wild-type human Neu2 (SEQ ID NO: 1).

[0189] In certain embodiments, the third polypeptide comprises the amino acid sequence of

(SEQ ID NO: 105)
X₁ASLPX₂LQX₃ESVFQSGAHAYRIPALLYLPGQQSLLAFAEQRASKKDE
HAELIVLRRGDYDAX₄THQVQWQAQEVVAQARLDGHRSMNPCPLYDX₅Q
TGTLFLFFIAIPGQVTEQQQLQTRANVTRLCQVTSTDHGRTWSSPRDL
TDAAIGPAYREWSTFAVGPGHCLQLHDRARSLWPAYAYRKLHPX₆QRPI
PSAFCFLSHDHGRTWARGHFVAQDTLECQVAEVETGEQRVVTLNARSHL
RARVQAQSTNDGLDFQESQLVKKLVEPPPX₇GCQGSVISFPSPRSGPGS
PAQWLLYTHPTHX₈X₉QRADLGAYLNPRPPAPEAWSEPVLLAKGSX₁₀AY
SDLQSMGTGPDGSPLFGCLYEANDYEEIX₁₁FX₁₂MFTLKQAFPAEYLPQ
X₁₃DKTHTCPPCPAPELLGGPSVFLFPPKPKDTLMISRTPEVTCVWDVS
HEDPEVKFNWYVDGVEVHNAKTKPREEQYNSTYRVVSVLTVLHQDWLN
GKEYKCKVSNKALPAPIEKTISKAKGQPREPQVYTLPPSREEMTKNQV
SLTCLVKGFYPSDIAVEWESNGQPENNYKTTPPVLDSDGSFFLTSKLT
VDKSRWQQGNVFSCSVMHEALHNHYTQKSLSLSPGK,

wherein X₁ is Ala, Arg, Asn, Asp, Gln, Glu, Gly, His, Leu, Lys, Met, Phe, Thr, Val, or not present, X₂ is Phe, Trp, Tyr or Val, X₃ is Lys or Asp, X₄ is Pro, Asn, Asp, His, Glu, Gly, Ser or Thr, X₅ is Ala, Glu, or Lys, X₆ is Arg, Ile, or Lys, X₇ is Gln, Ala, His, Phe, or Pro, X₈ is Ser or Arg, X₉ is Trp or Lys, X₁₀ is Ala, Cys, Ser, or Val, X₁₁ is Val or Arg, X₁₂ is Leu, Gln, His, Ile, Lys, or Ser, and X₁₃ is GGGGSGGGGS (SEQ ID NO: 107) or EPKSS (SEQ ID NO: 108), and the sialidase comprises at least one mutation relative to wild-type human Neu2 (SEQ ID NO: 1). In certain embodiments, X₁ is Ala, Asp, Met, or not present, X₂ is Tyr or Val, X₃ is Lys or Asp, X₄ is Pro, Asn, Gly, Ser or Thr, X₅ is Ala or Glu, X₆ is Ile or Lys, X₇ is Gln or Ala, X₈ is Ser or Arg, X₉ is Trp or Lys, X₁₀ is Ala or Cys, X₁₁ is Val or Arg, and X₁₂ is Leu or Ile.

[0190] In certain embodiments, the third polypeptide comprises the amino acid sequence of

(SEQ ID NO: 121)
X₁X₂SX₃X₄X₅LQX₆ESVFQSGAHAYRIPALLYLPGQQSLLAFAEQRASX₇
X₈DEHAELIVX₉RRGDYDAX₁₀THQVQWX₁₁AQEVVAQAX₁₂LX₁₃GHRSMN
PCPLYDX₁₄QTGTLFLFFIAIPX₁₅X₁₆VTEX₁₇QQLQTRANVTRLX₁₈X₁₉V
TSTDHGRTWSSPRDLTDAAIGPX₂₀YREWSTFAVGPGHX₂₁LQLHDX₂₂X₂₃
RSLVVPAYAYRKLHPX₂₄X₂₅X₂₆PIPSAFX₂₇FLSHDHGRTWARGHFVX₂₈
QDTX₂₉ECQVAEVX₃₀TGEQRVVTLNARSX₃₁X₃₂X₃₃X₃₄RX₃₅QAQSX₃₆N
X₃₇GLDFQX₃₈X₃₉QX₄₀VKKLX₄₁EPPPX₄₂GX₄₃QGSVISFPSPRSGPGSP
AQX₄₄LLYTHPTHX₄₅X₄₆QRADLGAYLNPRPPAPEAWSEPX₄₇LLAKGS
X₄₈AYSDLQSMGTGPDGSPLFGX₄₉LYEANDYEEIX₅₀FX₅₁MFTLKQAFP
AEYLPQX₅₂DKTHTCPPCPAPELLGGPSVFLFPPKPKDTLMISRTPEVT
CVVVDVSHEDPEVKFNWYVDGVEVHNAKTKPREEQYNSTYRVVSVLTV
LHQDWLNGKEYKCKVSNKALPAPIEKTISKAKGQPREPQVYTLPPSREE
MTKNQVSLTCLVKGFYPSDIAVEWESNGQPENNYKTTPPVLDSDGSFFL
TSKLTVDKSRWQQGNVFSCSVMHEALHNHYTQKSLSLSPGK,

wherein X₁ is Ala, Arg, Asn, Asp, Gln, Glu, Gly, His, Leu, Lys, Met, Phe, Thr, Val, or not present, X₂ is Ala or Lys, X₃ is Asn or Leu, X₄ is Pro or His, X₅ is Phe, Trp, Tyr or Val, X₆ is Lys or Asp, X₇ is Lys, Arg, or Glu, X₈ is Lys, Ala, Arg, or Glu, X₉ is Leu or Met, X₁₀ is Pro, Asn, Asp, His, Glu, Gly, Ser or Thr, X₁₁ is Gln or His, X₁₂ is Arg or Lys, X₁₃ is Asp or Pro, X₁₄ is Ala, Glu or Lys, X₁₅ is Gly or Asp, X₁₆ is Gln or His, X₁₇ is Gln, Arg, or Lys, X₁₈ is Ala, Cys, Ile, Ser, Val, or Leu, X₁₉ is Gln, Leu, Glu, Phe, His, Ile, Leu, or Tyr, X₂₀ is Ala or Val, X₂₁ is Cys or Gly, X₂₂ is Arg or Pro, X₂₃ is Ala or Gly, X₂₄ is Arg, Ile, or Lys, X₂₅ is Gln or Pro, X₂₆ is Arg or Pro, X₂₇ is Ala, Cys, Leu, or Val, X₂₈ is Ala, Cys, Asn, Ser, or Thr, X₂₉ is Leu, Ala, or Val, X₃₀ is Glu or Pro, X₃₁ is His or Pro, X₃₂ is Leu, Asp, Asn, or Tyr, X₃₃ is Arg, Ala, Asp, Leu, Gln, or Tyr, X₃₄ is Ala, Cys, Phe, Gly, His, Ile, Lys, Leu, Met, Asn, Gln, Arg, Ser, Val, Trp, or Tyr, X₃₅ is Val, Ile, or Lys, X₃₆ is Thr or Ala, X₃₇ is Asp or Gly, X₃₈ is Glu, Lys, or Pro, X₃₉ is Ser or Cys, X₄₀ is Leu, Asp, Phe, Gln, or Thr, X₄₁ is Val or Phe, X₄₂ is Gln, Ala, His, Phe, Pro, Ser, or Thr, X₄₃ is Cys or Val, X₄₄ is Trp or Arg, X₄₅ is Ser, Arg, Ala, Asp, Glu, Phe, Gly, His, Ile, Lys, Leu, Met, Asn, Pro, Gln, Thr, Val, Trp, or Tyr, X₄₆ is Trp, Lys, Ala, Asp, Glu, Phe, Gly, His, Ile, Lys, Leu, Met, Asn, Pro, Gln, Arg, Ser, Thr, Val, or Tyr, X₄₇ is Lys or Val, X₄₈ is Ala, Cys, Ser, or Val, X₄₉ is Cys, Leu, or Val, X₅₀ is Val or Arg, X₅₁ is Leu, Gln, His, Ile, Lys, or Ser, X₅₂ is GGGGS (SEQ ID NO: 140), GGGGSGGGGS (SEQ ID NO: 107), or EPKSS (SEQ ID NO: 108), and the sialidase comprises at least one mutation relative to wild-type human Neu2 (SEQ ID NO: 1).

[0191] In certain embodiments, the third polypeptide comprises the amino acid sequence of

(SEQ ID NO: 120)
X₁ASLPX₂LQX₃ESVFQSGAHAYRIPALLYLPGQQSLLAFAEQRASKKDE
HAELIVLRRGDYDAX₄THQVQWQAQEVVAQARLDGHRSMNPCPLYDX₅QT
GTLFLFFIAIPGQVTEQQQLQTRANVTRLCX₆VTSTDHGRTWSSPRDLTD
AAIGPAYREWSTFAVGPGHCLQLHDRARSLWPAYAYRKLHPX₇QRPIPSA
FCFLSHDHGRTWARGHFVAQDTLECQVAEVETGEQRWTLNARSHLRX₈RV
QAQSTNDGLDFQESQLVKKLVEPPPX₉GCQGSVISFPSPRSGPGSPAQWL
LYTHPTHX₁₀X₁₁QRADLGAYLNPRPPAPEAWSEPVLLAKGSX₁₂AYSDLQS
MGTGPDGSPLFGCLYEANDYEEIX₁₃FX₁₄MFTLKQAFPAEYLPQX₁₅DKTH
TCPPCPAPELLGGPSVFLFPPKPKDTLMISRTPEVTCVVVDVSHEDPEVK
FNWYVDGVEVHNAKTKPREEQYNSTYRVVSVLTVLHQDWLNGKEYKCKVS
NKALPAPIEKTISKAKGQPREPQVYTLPPSREEMTKNQVSLTCLVKGFYP
SDIAVEWESNGQPENNYKTTPPVLDSDGSFFLTSKLTVDKSRWQQGNVFS
CSVMHEALHNHYTQKSLSLSPGK,

wherein X₁ is Ala, Arg, Asn, Asp, Gln, Glu, Gly, His, Leu, Lys, Met, Phe, Thr, Val, or not present, X₂ is Phe, Trp, Tyr or Val, X₃ is Lys or Asp, X₄ is Pro, Asn, Asp, His, Glu, Gly, Ser or Thr, X₅ is Ala, Glu, or Lys, X₆ is Gln, Leu, Glu, Phe, His, Ile, Leu, or Tyr, X₇ is Arg, Ile, or Lys, X₈ is Ala, Cys, Phe, Gly, His, Ile, Lys, Leu, Met, Asn, Gln, Arg, Ser, Val, Trp, or Tyr, X₉ is Gln, Ala, His, Phe, Pro, Ser, or Thr, X₁₀ is Ser, Arg, Ala, Asp, Glu, Phe, Gly, His, Ile, Lys, Leu, Met, Asn, Pro, Gln, Thr, Val, Trp, or Tyr, X₁₁ is Trp, Lys, Ala, Asp, Glu, Phe, Gly, His, Ile, Lys, Leu, Met, Asn, Pro, Gln, Arg, Ser, Thr, Val, or Tyr, X₁₂ is Ala, Cys, Ser, or Val, X₁₃ is Val or Arg, X₁₄ is Leu, Gln, His, Ile, Lys, or Ser, X₁₅ is GGGGS (SEQ ID NO: 140), GGGGSGGGGS (SEQ ID NO: 107), or EPKSS (SEQ ID NO: 108), and the sialidase comprises at least one mutation relative to wild-type human Neu2 (SEQ ID NO: 1). In certain embodiments, X₁ is Ala, Asp, Met, or not present, X₂ is Tyr or Val, X₃ is Lys or Asp, X₄ is Pro, Asn, Gly, Ser or Thr, X₅ is Ala or Glu, X₆ is Gln or Tyr, X₇ is Ile or Lys, X₈ is Ala or Thr, X₉ is Gln, Ala, or Thr, X₁₀ is Ser, Arg, or Ala, X₁₁ is Trp, Lys, or Arg, X₁₂ is Ala or Cys, X₁₃ is Val or Arg, and X₁₄ is Leu or Ile.

[0192] In certain embodiments, the first polypeptide comprises SEQ ID NO: 66, the second polypeptide comprises SEQ ID NO: 67, and the third polypeptide comprises SEQ ID NO: 68. In certain embodiments, the first polypeptide comprises SEQ ID NO: 66, the second polypeptide comprises SEQ ID NO: 67, and the third polypeptide comprises SEQ ID NO: 69. In certain embodiments, the first polypeptide comprises SEQ ID NO: 66, the second polypeptide comprises SEQ ID NO: 67, and the third polypeptide comprises SEQ ID NO: 70. In certain embodiments, the first polypeptide comprises SEQ ID NO: 66, the second polypeptide comprises SEQ ID NO: 67, and the third polypeptide comprises SEQ ID NO: 71. In certain embodiments, the first polypeptide comprises SEQ ID NO: 66, the second polypeptide comprises SEQ ID NO: 67, and the third polypeptide comprises SEQ ID NO: 72. In certain embodiments, the first polypeptide comprises SEQ ID NO: 66, the second polypeptide comprises SEQ ID NO: 67, and the third polypeptide comprises SEQ ID NO: 73. In certain embodiments, the first polypeptide comprises SEQ ID NO: 66, the second polypeptide comprises SEQ ID NO: 67, and the third polypeptide comprises SEQ ID NO: 74. In certain embodiments, the first polypeptide comprises SEQ ID NO: 66, the second polypeptide comprises SEQ ID NO: 67, and the third polypeptide comprises SEQ ID NO: 98. In certain embodiments, the first polypeptide comprises SEQ ID NO: 66, the second polypeptide comprises SEQ ID NO: 67, and the third polypeptide comprises SEQ ID NO: 99. In certain embodiments, the first polypeptide comprises SEQ ID NO: 66, the second polypeptide comprises SEQ ID NO: 67, and the third polypeptide comprises SEQ ID NO: 100. In certain embodiments, the first polypeptide comprises SEQ ID NO: 66, the second polypeptide comprises SEQ ID NO: 67, and the third polypeptide comprises SEQ ID NO: 101. In certain embodiments, the first polypeptide comprises SEQ ID NO: 66, the second polypeptide comprises SEQ ID NO: 67, and the third polypeptide comprises SEQ ID NO: 102. In certain embodiments, the first polypeptide comprises SEQ ID NO: 66, the second polypeptide comprises SEQ ID NO: 67, and the third polypeptide comprises SEQ ID NO: 103. In certain embodiments, the first polypeptide comprises SEQ ID NO: 66, the second polypeptide comprises SEQ ID NO: 67, and the third polypeptide comprises SEQ ID NO: 104. In certain embodiments, the first polypeptide comprises SEQ ID NO: 66, the second polypeptide comprises SEQ ID NO: 67, and the third polypeptide comprises SEQ ID NO: 112. In certain embodiments, the first polypeptide comprises SEQ ID NO: 66, the second polypeptide comprises SEQ ID NO: 67, and the third polypeptide comprises SEQ ID NO: 113. In certain embodiments, the first polypeptide comprises SEQ ID NO: 66, the second polypeptide comprises SEQ ID NO: 67, and the third polypeptide comprises SEQ ID NO: 115. In certain embodiments, the first polypeptide comprises SEQ ID NO: 66, the second polypeptide comprises SEQ ID NO: 67, and the third polypeptide comprises SEQ ID NO: 116. In certain embodiments, the first polypeptide comprises SEQ ID NO: 66, the second polypeptide comprises SEQ ID NO: 67, and the third polypeptide comprises SEQ ID NO: 118. In certain embodiments, the first polypeptide comprises SEQ ID NO: 66, the second polypeptide comprises SEQ ID NO: 67, and the third polypeptide comprises SEQ ID NO: 119. In certain embodiments, the first polypeptide comprises SEQ ID NO: 66, the second polypeptide comprises SEQ ID NO: 67, and the third polypeptide comprises SEQ ID NO: 141. In certain embodiments, the first polypeptide comprises SEQ ID NO: 66, the second polypeptide comprises SEQ ID NO: 67, and the third polypeptide comprises SEQ ID NO: 152. In certain embodiments, the first polypeptide comprises SEQ ID NO: 66, the second polypeptide comprises SEQ ID NO: 67, and the third polypeptide comprises SEQ ID NO: 154. In certain embodiments, the first polypeptide comprises SEQ ID NO: 66, the second polypeptide comprises SEQ ID NO: 149, and the third polypeptide comprises SEQ ID NO: 143. In certain embodiments, the first polypeptide comprises SEQ ID NO: 66, the second polypeptide comprises SEQ ID NO: 149, and the third polypeptide comprises SEQ ID NO: 145.

[0193] In certain embodiments, the antibody conjugate comprises a first polypeptide comprising a first sialidase, a first immunoglobulin Fc domain, and a first single chain variable fragment (scFv) (it is also understood that the scFv may be replaced by a first polypeptide chain of an immunoglobulin antigen binding fragment, e.g., Fab fragment); and a second polypeptide comprising a second sialidase, a second immunoglobulin Fc domain, and a second single chain variable fragment (scFv) (it is also understood that the scFv may be replaced by a second polypeptide chain of an immunoglobulin antigen binding fragment, e.g., Fab fragment). An example of this embodiment is shown in FIG. 19C. The first and second polypeptides can be covalently linked together. The covalent linkages can be disulfide bonds. In certain embodiments, the first scFv defines a first anti-HER2 antigen-binding site, and the second scFv defines a second anti-HER2 antigen-binding site. In certain embodiments, the first polypeptide comprises the first sialidase, the first immunoglobulin Fc domain, and the first scFv in an N- to C-terminal orientation. In certain embodiments, the first polypeptide comprises the first scFv, the first immunoglobulin Fc domain, and the first sialidase in an N- to C-terminal orientation. In certain embodiments, the second polypeptide comprises the second sialidase, the second immunoglobulin Fc domain, and the second scFv in an N- to C-terminal orientation. In certain embodiments, the second polypeptide comprises the second scFv, the second immunoglobulin Fc domain, and the second sialidase in an N- to C-terminal orientation.

[0194] In certain embodiments, the first polypeptide comprises the amino acid sequence of any one of SEQ ID NOs: 77-83, 122-134, 153, or 155, or an amino acid sequence that has at least 85%, 90%, 95%, 96%, 97%, 98%, or 99% sequence identity to any one of SEQ ID NOs: 77-83, 122-134, 153, or 155. In certain embodiments, the second polypeptide comprises the amino acid sequence of any one of SEQ ID NOs: 77-83, 122-134, 153, or 155, or an amino acid sequence that has at least 85%, 90%, 95%, 96%, 97%, 98%, or 99% sequence identity to any one of SEQ ID NOs: 77-83, 122-134, 153, or 155.

[0195] In certain embodiments, the first and/or second polypeptide comprises the amino acid sequence of

(SEQ ID NO: 85)
X₁X₂SX₃X₄X₅LQX₆ESVFQSGAHAYRIPALLYLPGQQSLLAFAEQRASX₇
X₈DEHAELIVX₉RRGDYDAX₁₀THQVQWX₁₁AQEVVAQAX₁₂LDGHRSMNPC
PLYDX₁₃QTGTLFLFFIAIPX₁₄X₁₅VTEX₁₆QQLQTRANVTRLX₁₇X₁₈VTS
TDHGRTWSSPRDLTDAAIGPX₁₉YREWSTFAVGPGHX₂₀LQLHDRX₂₁RSL
VVPAYAYRKLHPX₂₂QRPIPSAFX₂₃FLSHDHGRTWARGHFVAQDTX₂₄EC
QVAEVETGEQRVVTLNARSHLRARVQAQSX₂₅NX₂₆GLDFQX₂₇SQLVKKL
VEPPPX₂₈GX₂₉QGSVISFPSPRSGPGSPAQX₃₀LLYTHPTHX₃₁X₃₂QRAD
LGAYLNPRPPAPEAWSEPX₃₃LLAKGSX₃₄AYSDLQSMGTGPDGSPLFG
X₃₅LYEANDYEEIX₃₆FX₃₇MFTLKQAFPAEYLPQGGGGSGGGGSDKTHT
CPPCPAPELLGGPSVFLFPPKPKDTLMISRTPEVTCVVVDVSHEDPEV
KFNWYVDGVEVHNAKTKPREEQYNSTYRVVSVLTVLHQDWLNGKEYKC
KVSNKALPAPIEKTISKAKGQPREPQVYTLPPSREEMTKNQVSLTCLV
KGFYPSDIAVEWESNGQPENNYKTTPPVLDSDGSFFLYSKLTVDKSRW
QQGNVFSCSVMHEALHNHYTQKSLSLSPGKGGGGSGGGGSGGGGSEVQ
LVESGGGLVQPGGSLRLSCAASGFNIKDTYIHWVRQAPGKGLEWVARI
YPTNGYTRYADSVKGRFTISADTSKNTAYLQMNSLRAEDTAVYYCSRW
GGDGFYAMDYWGQGTLVTVSSGGGGSGGGGSGGGGSDIQMTQSPSSLS
ASVGDRVTITCRASQDVNTAVAWYQQKPGKAPKLLIYSASFLYSGVPS
RFSGSRSGTDFTLTISSLQPEDFATYYCQQHYTTPPTFGQGTKVEIK,

wherein X₁ is Ala, Arg, Asn, Asp, Gln, Glu, Gly, His, Leu, Lys, Met, Phe, Thr, Val, or not present, X₂ is Ala or Lys, X₃ is Asn or Leu, X₄ is Pro or His, X₅ is Phe, Trp, Tyr or Val, X₆ is Lys or Asp, X₇ is Lys, Arg, or Glu. X₈ is Lys, Ala, Arg, or Glu, X₉ is Leu or Met, X₁₀ is Pro, Asn, Asp, His, Glu, Gly, Ser or Thr, X₁₁ is Gln or His, X₁₂ is Arg or Lys, X₁₃ is Ala, Glu or Lys, X₁₄ is Gly or Asp, X₁₅ is Gln or His, X₁₆ is Gln, Arg, or Lys, X₁₇ is Ala, Cys, Ile, Ser, Val, or Leu, X₁₈ is Gln or Leu, X₁₉ is Ala or Val, X₂₀ is Cys or Gly, X₂₁ is Ala or Gly, X₂₂ is Arg, Ile, or Lys, X₂₃ is Ala, Cys, Leu, or Val, X₂₄ is Leu, Ala, or Val, X₂₅ is Thr or Ala, X₂₆ is Asp or Gly, X₂₇ is Glu or Lys, X₂₈ is Gln, Ala, His, Phe, or Pro, X₂₉ is Cys or Val, X₃₀ is Trp or Arg, X₃₁ is Ser or Arg, X₃₂ is Trp or Lys, X₃₃ is Lys or Val, X₃₄ is Ala, Cys, Ser, or Val, X₃₅ is Cys, Leu, or Val, X₃₅ is Val or Arg, and X₃₇ is Leu, Gln, His, Ile, Lys, or Ser, and the sialidase comprises at least one mutation relative to wild-type human Neu2 (SEQ ID NO: 1).

[0196] In certain embodiments, the first and/or second polypeptide comprises the amino acid sequence of

(SEQ ID NO: 84)
X₁ASLPX₂LQX₃ESVFQSGAHAYRIPALLYLPGQQSLLAFAEQRASKKDE
HAELIVLRRGDYDAX₄THQVQWQAQEVVAQARLDGHRSMNPCPLYDX₅QT
GTLFLFFIAIPGQVTEQQQLQTRANVTRLCQVTSTDHGRTWSSPRDLTD
AAIGPAYREWSTFAVGPGHCLQLHDRARSLWPAYAYRKLHPX₆QRPIPS
AFCFLSHDHGRTWARGHFVAQDTLECQVAEVETGEQRVVTLNARSHLRA
RVQAQSTNDGLDFQESQLVKKLVEPPPX₇GCQGSVISFPSPRSGPGSPA
QWLLYTHPTHX₈X₉QRADLGAYLNPRPPAPEAWSEPVLLAKGSX₁₀AYSD
LQSMGTGPDGSPLFGCLYEANDYEEIX₁₁FX₁₂MFTLKQAFPAEYLPQGG
GGSGGGGSDKTHTCPPCPAPELLGGPSVFLFPPKPKDTLMISRTPEVTC
VVVDVSHEDPEVKFNWYVDGVEVHNAKTKPREEQYNSTYRVVSVLTVLH
QDWLNGKEYKCKVSNKALPAPIEKTISKAKGQPREPQVYTLPPSREEMT
KNQVSLTCLVKGFYPSDIAVEWESNGQPENNYKTTPPVLDSDGSFFLYS
kLTVDKSRWQQGNVFSCSVMHEALHNHYTQKSLSLSPGKGGGGSGGGGS
GGGGSEVQLVESGGGLVQPGGSLRLSCAASGFNIKDTYIHWVRQAPGKG
LEWVARIYPTNGYTRYADSVKGRFTISADTSKNTAYLQMNSLRAEDTAV
YYCSRWGGDGFYAMDYWGQGTLVTVSSGGGGSGGGGSGGGGSDIQMTQS
PSSLSASVGDRVTITCRASQDVNTAVAWYQQKPGKAPKLLIYSASFLYS
GVPSRFSGSRSGTDFTLTISSLQPEDFATYYCQQHYTTPPTFGQGTKVE
IK,

wherein X₁ is Ala, Arg, Asn, Asp, Gln, Glu, Gly, His, Leu, Lys, Met, Phe, Thr, Val, or not present, X₂ is Phe, Trp, Tyr or Val, X₃ is Lys or Asp, X₄ is Pro, Asn, Asp, His, Glu, Gly, Ser or Thr, X₅ is Ala, Glu, or Lys, X₆ is Arg, Ile, or Lys, X₇ is Gln, Ala, His, Phe, or Pro, X₈ is Ser or Arg, X₉ is Trp or Lys, X₁₀ is Ala, Cys, Ser, or Val, X₁₁ is Val or Arg, and X₁₂ is Leu, Gln, His, Ile, Lys, or Ser, and the sialidase comprises at least one mutation relative to wild-type human Neu2 (SEQ ID NO: 1). In certain embodiments, X₁ is Ala, Asp, Met, or not present, X₂ is Tyr or Val, X₃ is Lys or Asp, X₄ is Pro, Asn, Gly, Ser or Thr, X₅ is Ala or Glu, X₆ is Ile or Lys, X₇ is Gln or Ala, X₈ is Ser or Arg, X₉ is Trp or Lys, X₁₀ is Ala or Cys, X₁₁ is Val or Arg, and X₁₂ is Leu or Ile.

[0197] In certain embodiments, the first and/or second polypeptide comprises the amino acid sequence of

(SEQ ID NO: 136)
X₁X₂SX₃X₄X₅LQX₆ESVFQSGAHAYRIPALLYLPGQQSLLAFAEQRASX₇
X₈DEHAELIVX₉RRGDYDAX₁₀THQVQWX₁₁AQEVVAQAX₁₂LX₁₃GHRSMN
PCPLYDX₁₄QTGTLFLFFIAIPX₁₅X₁₆VTEX₁₇QQLQTRANVTRLX₁₈X₁₉V
TSTDHGRTWSSPRDLTDAAIGPX₂₀YREWSTFAVGPGHX₂₁LQLHDX₂₂X₂₃
RSLVVPAYAYRKLHPX₂₄X₂₅X₂₆PIPSAFX₂₇FLSHDHGRTWARGHFVX₂₈
QDTX₂₉ECQVAEVX₃₀TGEQRVVTLNARSX₃₁X₃₂X₃₃X₃₄RX₃₅QAQSX₃₆NX₃₇
GLDFQX₃₈X₃₉QX₄₀VKKLX₄₁EPPPX₄₂GX₄₃QGSVISFPSPRSGPGSPAQX₄
₄LLYTHPTHX₄₅X₄₆QRADLGAYLNPRPPAPEAWSEPX₄₇LLAKGSX₄₈AYS
DLQSMGTGPDGSPLFGX₄₉LYEANDYEEIX₅₀FX₅₁MFTLKQAFPAEYLPQ
X₅₂DKTHTCPPCPAPELLGGPSVFLFPPKPKDTLMISRTPEVTCVVVDVS
HEDPEVKFNWYVDGVEVHNAKTKPREEQYNSTYRVVSVLTVLHQDWLNG
KEYKCKVSNKALPAPIEKTISKAKGQPREPQVYTLPPSREEMTKNQVSL
TCLVKGFYPSDIAVEWESNGQPENNYKTTPPVLDSDGSFFLYSKLTVDK
SRWQQGNVFSCSVMHEALHNHYTQKSLSLSPGKGGGGSGGGGSGGGGSE
VQLVESGGGLVQPGGSLRLSCAASGFNIKDTYIHWVRQAPGKGLEWVAR
IYPTNGYTRYADSVKGRFTISADTSKNTAYLQMNSLRAEDTAVYYCSRW
GGDGFYAMDYWGQGTLVTVSSGGGGSGGGGSGGGGSDIQMTQSPSSLSA
SVGDRVTITCRASQDVNTAVAWYQQKPGKAPKLLIYSASFLYSGVPSRF
SGSRSGTDFTLTISSLQPEDFATYYCQQHYTTPPTFGQGTKVEIK,

wherein X₁ is Ala, Arg, Asn, Asp, Gln, Glu, Gly, His, Leu, Lys, Met, Phe, Thr, Val, or not present, X₂ is Ala or Lys, X₃ is Asn or Leu, X₄ is Pro or His, X₅ is Phe, Trp, Tyr or Val, X₆ is Lys or Asp, X₇ is Lys, Arg, or Glu, X₈ is Lys, Ala, Arg, or Glu, X₉ is Leu or Met, X₁₀ is Pro, Asn, Asp, His, Glu, Gly, Ser or Thr, X₁₁ is Gln or His, X₁₂ is Arg or Lys, X₁₃ is Asp or Pro, X₁₄ is Ala, Glu or Lys, X₁₅ is Gly or Asp, X₁₆ is Gln or His, X₁₇ is Gln, Arg, or Lys, X₁₈ is Ala, Cys, Ile, Ser, Val, or Leu, X₁₉ is Gln, Leu, Glu, Phe, His, Ile, Leu, or Tyr, X₂₀ is Ala or Val, X₂₁ is Cys or Gly, X₂₂ is Arg or Pro, X₂₃ is Ala or Gly, X₂₄ is Arg, Ile, or Lys, X₂₅ is Gln or Pro, X₂₆ is Arg or Pro, X₂₇ is Ala, Cys, Leu, or Val, X₂₈ is Ala, Cys, Asn, Ser, or Thr, X₂₉ is Leu, Ala, or Val, X₃₀ is Glu or Pro, X₃₁ is His or Pro, X₃₂ is Leu, Asp, Asn, or Tyr, X₃₃ is Arg, Ala, Asp, Leu, Gln, or Tyr, X₃₄ is Ala, Cys, Phe, Gly, His, Ile, Lys, Leu, Met, Asn, Gln, Arg, Ser, Val, Trp, or Tyr, X₃₅ is Val, Ile, or Lys, X₃₆ is Thr or Ala, X₃₇ is Asp or Gly, X₃₈ is Glu, Lys, or Pro, X₃₉ is Ser or Cys, X₄₀ is Leu, Asp, Phe, Gln, or Thr, X₄₁ is Val or Phe, X₄₂ is Gln, Ala, His, Phe, Pro, Ser, or Thr, X₄₃ is Cys or Val, X₄₄ is Trp or Arg, X₄₅ is Ser, Arg, Ala, Asp, Glu, Phe, Gly, His, Ile, Lys, Leu, Met, Asn, Pro, Gln, Thr, Val, Trp, or Tyr, X₄₆ is Trp, Lys, Ala, Asp, Glu, Phe, Gly, His, Ile, Lys, Leu, Met, Asn, Pro, Gln, Arg, Ser, Thr, Val, or Tyr, X₄₇ is Lys or Val, X₄₈ is Ala, Cys, Ser, or Val, X₄₉ is Cys, Leu, or Val, X₅₀ is Val or Arg, X₅₁ is Leu, Gln, His, Ile, Lys, or Ser, X₅₂ is GGGGS (SEQ ID NO: 140), GGGGSGGGGS (SEQ ID NO: 107), or EPKSS (SEQ ID NO: 108), and the sialidase comprises at least one mutation relative to wild-type human Neu2 (SEQ ID NO: 1).

[0198] In certain embodiments, the first and/or second polypeptide comprises the amino acid sequence of

(SEQ ID NO: 135)
X₁ASLPX₂LQX₃ESVFQSGAHAYRIPALLYLPGQQSLLAFAEQRASKKDE
HAELIVLRRGDYDAX₄THQVQWQAQEVVAQARLDGHRSMNPCPLYDX₅QT
GTLFLFFIAIPGQVTEQQQLQTRANVTRLCX₆VTSTDHGRTWSSPRDLTD
AAIGPAYREWSTFAVGPGHCLQLHDRARSLWPAYAYRKLHPX₇QRPIPSA
FCFLSHDHGRTWARGHFVAQDTLECQVAEVETGEQRWTLNARSHLRX₈RV
QAQSTNDGLDFQESQLVKKLVEPPPX₉GCQGSVISFPSPRSGPGSPAQWL
LYTHPTH [symbol] QRADLGAYLNPRPPAPEAWSEPVLLAKGSX₁₂AYSDLQS
MGTGPDGSPLFGCLYEANDYEEIX₁₃FX₁₄MFTLKQAFPAEYLPQX₁₅DKTH
TCPPCPAPELLGGPSVFLFPPKPKDTLMISRTPEVTCVVVDVSHEDPEVK
FNWYVDGVEVHNAKTKPREEQYNSTYRVVSVLTVLHQDWLNGKEYKCKVS
NKALPAPIEKTISKAKGQPREPQVYTLPPSREEMTKNQVSLTCLVKGFYP
SDIAVEWESNGQPENNYKTTPPVLDSDGSFFLYSKLTVDKSRWQQGNVFS
CSVMHEALHNHYTQKSLSLSPGKGGGGSGGGGSGGGGSEVQLVESGGGLV
QPGGSLRLSCAASGFNIKDTYIHWVRQAPGKGLEWVARIYPTNGYTRYAD
SVKGRFTISADTSKNTAYLQMNSLRAEDTAVYYCSRWGGDGFYAMDYWGQ
GTLVTVSSGGGGSGGGGSGGGGSDIQMTQSPSSLSASVGDRVTITCRASQ
DVNTAVAWYQQKPGKAPKLLIYSASFLYSGVPSRFSGSRSGTDFTLTISS
LQPEDFATYYCQQHYTTPPTFGQGTKVEIK,

wherein X₁ is Ala, Arg, Asn, Asp, Gln, Glu, Gly, His, Leu, Lys, Met, Phe, Thr, Val, or not present, X₂ is Phe, Trp, Tyr or Val, X₃ is Lys or Asp, X₄ is Pro, Asn, Asp, His, Glu, Gly, Ser or Thr, X₅ is Ala, Glu, or Lys, X₆ is Gln, Leu, Glu, Phe, His, Ile, Leu, or Tyr, X₇ is Arg, Ile, or Lys, X₈ is Ala, Cys, Phe, Gly, His, Ile, Lys, Leu, Met, Asn, Gln, Arg, Ser, Val, Trp, or Tyr, X₉ is Gln, Ala, His, Phe, Pro, Ser, or Thr, X₁₀ is Ser, Arg, Ala, Asp, Glu, Phe, Gly, His, Ile, Lys, Leu, Met, Asn, Pro, Gln, Thr, Val, Trp, or Tyr, X₁₁ is Trp, Lys, Ala, Asp, Glu, Phe, Gly, His, Ile, Lys, Leu, Met, Asn, Pro, Gln, Arg, Ser, Thr, Val, or Tyr, X₁₂ is Ala, Cys, Ser, or Val, X₁₃ is Val or Arg, X₁₄ is Leu, Gln, His, Ile, Lys, or Ser, X₁₅ is GGGGS (SEQ ID NO: 140), GGGGSGGGGS (SEQ ID NO: 107), or EPKSS (SEQ ID NO: 108), and the sialidase comprises at least one mutation relative to wild-type human Neu2 (SEQ ID NO: 1). In certain embodiments, X₁ is Ala, Asp, Met, or not present, X₂ is Tyr or Val, X₃ is Lys or Asp, X₄ is Pro, Asn, Gly, Ser or Thr, X₅ is Ala or Glu, X₆ is Gln or Tyr, X₇ is Ile or Lys, X₈ is Ala or Thr, X₉ is Gln, Ala, or Thr, X₁₀ is Ser, Arg, or Ala, X₁₁ is Trp, Lys, or Arg, X₁₂ is Ala or Cys, X₁₃ is Val or Arg, and X₁₄ is Leu or Ile.

[0199] In certain embodiments, the first and second polypeptide comprise SEQ ID NO: 77. In certain embodiments, the first and second polypeptide comprise SEQ ID NO: 78. In certain embodiments, the first and second polypeptide comprise SEQ ID NO: 79. In certain embodiments, the first and second polypeptide comprise SEQ ID NO: 80. In certain embodiments, the first and second polypeptide comprise SEQ ID NO: 81. In certain embodiments, the first and second polypeptide comprise SEQ ID NO: 82. In certain embodiments, the first and second polypeptide comprise SEQ ID NO: 83. In certain embodiments, the first and second polypeptide comprise SEQ ID NO: 122. In certain embodiments, the first and second polypeptide comprise SEQ ID NO: 123. In certain embodiments, the first and second polypeptide comprise SEQ ID NO: 124. In certain embodiments, the first and second polypeptide comprise SEQ ID NO: 125. In certain embodiments, the first and second polypeptide comprise SEQ ID NO: 126. In certain embodiments, the first and second polypeptide comprise SEQ ID NO: 127. In certain embodiments, the first and second polypeptide comprise SEQ ID NO: 128. In certain embodiments, the first and second polypeptide comprise SEQ ID NO: 129. In certain embodiments, the first and second polypeptide comprise SEQ ID NO: 130. In certain embodiments, the first and second polypeptide comprise SEQ ID NO: 131. In certain embodiments, the first and second polypeptide comprise SEQ ID NO: 132. In certain embodiments, the first and second polypeptide comprise SEQ ID NO: 133. In certain embodiments, the first and second polypeptide comprise SEQ ID NO: 134. In certain embodiments, the first and second polypeptide comprise SEQ ID NO: 153. In certain embodiments, the first and second polypeptide comprise SEQ ID NO: 155.

[0200] In certain embodiments, the antibody conjugate comprises: a first polypeptide comprising an immunoglobulin light chain; a second polypeptide comprising an immunoglobulin heavy chain and a single chain variable fragment (scFv) (it is also understood that the scFv may be replaced by a first polypeptide chain of an immunoglobulin antigen binding fragment, e.g., Fab fragment); and a third polypeptide comprising an immunoglobulin Fc domain and a sialidase. An example of this embodiment is shown in FIG. 19D. The first and second polypeptides can be covalently linked together and the second and third polypeptides can be covalently linked together. The covalent linkages can be disulfide bonds. In certain embodiments, the first polypeptide and the second polypeptide together define a first anti-HER2 antigen-binding site (i.e., the immunoglobulin light chain and immunoglobulin heavy chain together define a first anti-HER2 antigen-binding site). In certain embodiments, the scFv defines a second anti-HER2 antigen-binding site. In certain embodiments, the second polypeptide comprises the immunoglobulin heavy chain and the scFv in an N- to C-terminal orientation, or the scFv and the immunoglobulin heavy chain in an N- to C-terminal orientation. In certain embodiments, the third polypeptide comprises the sialidase and the immunoglobulin Fc domain in an N- to C-terminal orientation, or the sialidase and the immunoglobulin Fc domain in an N- to C-terminal orientation.

[0201] In certain embodiments, the antibody conjugate has a molecular weight from about 135 kDa to about 165 kDa, e.g., about 140 kDa. In other embodiments, the antibody conjugate has a molecular weight from about 215 kDa to about 245 kDa, e.g., about 230 kDa.

[0202] In certain embodiments, the antibody conjugate comprises two polypeptides that each comprise an immunoglobulin Fc domain, and the first polypeptide has either a “knob” mutation, e.g., T366Y, or a “hole” mutation, e.g., Y407T, for heterodimerization with the second polypeptide, and the second polypeptide has either a respective “knob” mutation, e.g., T366Y, or a “hole” mutation, e.g., Y407T, for heterodimerization with the first polypeptide (residue numbers according to EU numbering, Kabat, E. A., et al. (1991) supra). For example, in certain embodiments, the antibody comprises two polypeptides that each comprise an immunoglobulin Fc domain derived from human IgG1 Fc domain, and the first polypeptide comprises a Y407T mutation (e.g., the first polypeptide comprises SEQ ID NO: 32 or 109), and the second polypeptide comprises a T366Y mutation (e.g., the second polypeptide comprises SEQ ID NO: 33 or 110).

[0203] As used herein, the term “multispecific antibody” is understood to mean an antibody that specifically binds to at least two different antigens, i.e., an antibody that comprises at least two antigen-binding sites that bind to at least two different antigens. As used herein, the term “bispecific antibody” is understood to mean an antibody that specifically binds to two different antigens, i.e., an antibody that comprises two antigen-binding sites each of which bind to separate and distinct antigens. In other words, a first binding site binds a first antigen and a second binding site binds a second, different antigen. A multispecific or bispecific antibody may, for example, be a human or humanized antibody, and/or be a full length antibody or an antibody fragment (e.g., a F(ab′)₂ bispecific antibody).

[0204] The present invention encompasses antibody conjugates comprising antibody fragments, which may be generated by traditional means, such as enzymatic digestion, or by recombinant techniques. For a review of certain antibody fragments, see Hudson et al. (2003) supra.

[0205] In certain embodiments, the antibody conjugate or fusion protein can be covalently or non-covalently associated with a biological modifier, wherein the biological modifier can be used to enhance the solubility of the antibody, increase binding specificity, decrease immunogenicity or toxicity or modify the pharmacokinetic profile of the antibody. For example, the biological modifier can be used to increase the molecular weight of the antibody to increase its circulating half-life.

[0206] It is contemplated that the antibody conjugate or fusion protein may be covalently bound to one or more (for example, 2, 3, 4, 5, 6, 8, 9, 10 or more) biological modifiers that may comprise linear or branched polymers. Exemplary biological modifiers may include, for example, a variety of polymers, such as those described in U.S. Pat. No. 7,842,789. Particularly useful are polyalkylene ethers such as polyethylene glycol (PEG) and derivatives thereof (for example, alkoxy polyethylene glycol, for example, methoxypolyethylene glycol, ethoxypolyethylene glycol and the like); block copolymers of polyoxyethylene and polyoxypropylene (Pluronics); polymethacrylates; carbomers; and branched or unbranched polysaccharides which comprise the saccharide monomers such as D-mannose, D- and L-galactose, fucose, fructose, D-xylose, L-arabinose, and D-glucuronic acid.

[0207] In other embodiments, the biological modifier can be a hydrophilic polyvinyl polymer such as polyvinyl alcohol and polyvinylpyrrolidone (PVP)-type polymers. The biological modifier can be a functionalized polyvinylpyrrolidone, for example, carboxy or amine functionalized on one (or both) ends of the polymer (as available from PolymerSource). Alternatively, the biological modifier can include Poly N-(2-hydroxypropyl)methacrylamide (HPMA), or functionalized HPMA (amine, carboxy, etc.), Poly(N-isopropylacrylamide) or functionalized poly(N-isopropylacrylamide). Alternatively, the biological modifier can include Poly N-(2-hydroxypropyl)methacrylamide (HPMA), or functionalized HPMA (amine, carboxy, etc.), Poly(N-isopropylacrylamide) or functionalized poly(N-isopropylacrylamide). The modifier prior to conjugation need not be, but preferably is, water soluble, but the final conjugate should be water soluble.

[0208] In general, the biological modifier may have a molecular weight from about 2 kDa to about 5 kDa, from about 2 kDa to about 10 kDa, from about 2 kDa to about 20 kDa, from about 2 kDa to about 30 kDa, from about 2 kDa to about 40 kDa, from about 2 kDa to about 50 kDa, from about 2 kDa to about 60 kDa, from about 2 kDa to about 70 kDa, from about 2 kDa to about 80 kDa, from about 2 kDa to about 90 kDa, from about 2 kDa to about 100 kDa, from about 2 kDa to about 150 kDa, from about 5 kDa to about 10 kDa, from about 5 kDa to about 20 kDa, from about 5 kDa to about 30 kDa, from about 5 kDa to about 40 kDa, from about 5 kDa to about 50 kDa, from about 5 kDa to about 60 kDa, from about 5 kDa to about 70 kDa, from about 5 kDa to about 80 kDa, from about 5 kDa to about 90 kDa, from about 5 kDa to about 100 kDa, from about 5 kDa to about 150 kDa, from about 10 kDa to about 20 kDa, from about 10 kDa to about 30 kDa, from about 10 kDa to about 40 kDa, from about 10 kDa to about 50 kDa, from about 10 kDa to about 60 kDa, from about 10 kDa to about 70 kDa, from about 10 kDa to about 80 kDa, from about 10 kDa to about 90 kDa, from about 10 kDa to about 100 kDa, from about 10 kDa to about 150 kDa, from about 20 kDa to about 30 kDa, from about 20 kDa to about 40 kDa, from about 20 kDa to about 50 kDa, from about 20 kDa to about 60 kDa, from about 20 kDa to about 70 kDa, from about 20 kDa to about 80 kDa, from about 20 kDa to about 90 kDa, from about 20 kDa to about 100 kDa, from about 20 kDa to about 150 kDa, from about 30 kDa to about 40 kDa, from about 30 kDa to about 50 kDa, from about 30 kDa to about 60 kDa, from about 30 kDa to about 70 kDa, from about 30 kDa to about 80 kDa, from about 30 kDa to about 90 kDa, from about 30 kDa to about 100 kDa, from about 30 kDa to about 150 kDa, from about 40 kDa to about 50 kDa, from about 40 kDa to about 60 kDa, from about 40 kDa to about 70 kDa, from about 40 kDa to about 80 kDa, from about 40 kDa to about 90 kDa, from about 40 kDa to about 100 kDa, from about 40 kDa to about 150 kDa, from about 50 kDa to about 60 kDa, from about 50 kDa to about 70 kDa, from about 50 kDa to about 80 kDa, from about 50 kDa to about 90 kDa, from about 50 kDa to about 100 kDa, from about 50 kDa to about 150 kDa, from about 60 kDa to about 70 kDa, from about 60 kDa to about 80 kDa, from about 60 kDa to about 90 kDa, from about 60 kDa to about 100 kDa, from about 60 kDa to about 150 kDa, from about 70 kDa to about 80 kDa, from about 70 kDa to about 90 kDa, from about 70 kDa to about 100 kDa, from about 70 kDa to about 150 kDa, from about 80 kDa to about 90 kDa, from about 80 kDa to about 100 kDa, from about 80 kDa to about 150 kDa, from about 90 kDa to about 100 kDa, from about 90 kDa to about 150 kDa, or from about 100 kDa to about 150 kDa.

[0209] It is contemplated that the antibody conjugate or fusion protein is attached to about 10 or fewer polymer molecules (e.g., 9, 8, 7, 6, 5, 4, 3, 2, or 1), each polymer molecule having a molecular weight of at least about 20,000 D, or at least about 30,000 D, or at least about 40,000 D.

[0210] Although a variety of polymers can be used as biological modifiers, it is contemplated that the antibody conjugates or fusion proteins described herein may be attached to polyethylene glycol (PEG) polymers. In one embodiment, the antibody conjugate or fusion protein described herein is covalently attached to at least one PEG having an actual MW of at least about 20,000 D. In another embodiment, the antibody conjugate or fusion protein described herein is covalently attached to at least one PEG having an actual MW of at least about 30,000 D. In another embodiment, the antibody conjugate or fusion protein described herein is covalently attached to at least one PEG having an actual MW of at least about 40,000 D. In certain embodiments, the PEG is methoxyPEG(5000)-succinimidylpropionate (mPEG-SPA), methoxyPEG(5000)-succinimidylsuccinate (mPEG-SS). Such PEGS are commercially available from Nektar Therapeutics or SunBiowest.

[0211] Attachment sites on an antibody conjugate or fusion protein for a biological modifier include the N-terminal amino group and epsilon amino groups found on lysine residues, as well as other amino, imino, carboxyl, sulfhydryl, hydroxyl or other hydrophilic groups. The polymer may be covalently bonded directly to the antibody conjugate or fusion protein with or without the known use of a multifunctional (ordinarily bifunctional) crosslinking agent using chemistries and used in the art. For example, sulfhydryl groups can be derivatized by coupling to maleimido-substituted PEG (e.g. alkoxy-PEG amine plus sulfosuccinimidyl 4-(N-maleimidomethyl)cyclohexane-1-carboxylate), or PEG-maleimide commercially available from Shearwater Polymers, Inc., Huntsville, Ala.).

### II. Methods of Making a Fusion Protein or Antibody Conjugate

[0212] Methods for producing fusion proteins, e.g., those disclosed herein, antibodies, or antibody conjugates, e.g., those disclosed herein, are known in the art. For example, DNA molecules encoding light chain variable regions and/or heavy chain variable regions can be synthesized chemically or by recombinant DNA methodologies. For example, the sequences of the antibodies can be cloned from hybridomas by conventional hybridization techniques or polymerase chain reaction (PCR) techniques, using the appropriate synthetic nucleic acid primers. The resulting DNA molecules encoding the variable regions of interest can be ligated to other appropriate nucleotide sequences, including, for example, constant region coding sequences, and expression control sequences, to produce conventional gene expression constructs (i.e., expression vectors) encoding the desired antibodies. Production of defined gene constructs is within routine skill in the art.

[0213] Nucleic acids encoding desired fusion proteins, and/or antibody conjugates can be incorporated (ligated) into expression vectors, which can be introduced into host cells through conventional transfection or transformation techniques. Exemplary host cells are E. coli cells, Chinese hamster ovary (CHO) cells, human embryonic kidney 293 (HEK 293) cells, HeLa cells, baby hamster kidney (BHK) cells, monkey kidney cells (COS), human hepatocellular carcinoma cells (e.g., Hep G2), and myeloma cells that do not otherwise produce IgG protein. Transformed host cells can be grown under conditions that permit the host cells to express the genes that encode the immunoglobulin light and/or heavy chain variable regions.

[0214] Specific expression and purification conditions will vary depending upon the expression system employed. For example, if a gene is to be expressed in E. coli, it is first cloned into an expression vector by positioning the engineered gene downstream from a suitable bacterial promoter, e.g., Trp or Tac, and a prokaryotic signal sequence. The expressed protein may be secreted. The expressed protein may accumulate in refractile or inclusion bodies, which can be harvested after disruption of the cells by French press or sonication. The refractile bodies then are solubilized, and the protein may be refolded and/or cleaved by methods known in the art.

[0215] If the engineered gene is to be expressed in eukaryotic host cells, e.g., CHO cells, it is first inserted into an expression vector containing a suitable eukaryotic promoter, a secretion signal, a poly A sequence, and a stop codon. Optionally, the vector or gene construct may contain enhancers and introns. In embodiments involving fusion proteins comprising an antibody or portion thereof, the expression vector optionally contains sequences encoding all or part of a constant region, enabling an entire, or a part of, a heavy or light chain to be expressed. The gene construct can be introduced into eukaryotic host cells using conventional techniques.

[0216] The host cells express a fusion protein and/or antibody conjugate comprising a sialidase and V_{L} or V_{H} fragments, V_{L}-V_{H} heterodimers, V_{H}-V_{L} or V_{L}-V_{H} single chain polypeptides, complete heavy or light immunoglobulin chains, or portions thereof, each of which may be attached to a moiety having another function (e.g., cytotoxicity). In some embodiments involving fusion proteins and/or antibody conjugates, a host cell is transfected with a single vector expressing a polypeptide expressing a sialidase and an entire, or part of, a heavy chain (e.g., a heavy chain variable region) or a sialidase and a light chain (e.g., a light chain variable region), or a polypeptide expressing an entire, or part of, a heavy chain (e.g., a heavy chain variable region) or a light chain (e.g., a light chain variable region). In some embodiments, a host cell is transfected with a single vector encoding (a) a polypeptide comprising a heavy chain variable region and a polypeptide comprising a light chain variable region, or (b) an entire immunoglobulin heavy chain and an entire immunoglobulin light chain, wherein in (a) or in (b), the polypeptide may also comprise a sialidase. In some embodiments, a host cell is co-transfected with more than one expression vector (e.g., one expression vector expressing a polypeptide comprising an entire, or part of, a heavy chain or heavy chain variable region, optionally comprising a sialidase fused thereto, and another expression vector expressing a polypeptide comprising an entire, or part of, a light chain or light chain variable region, optionally comprising a sialidase fused thereto).

[0217] A polypeptide comprising a fusion protein, e.g., a fusion protein comprising an immunoglobulin heavy chain variable region or light chain variable region, can be produced by growing (culturing) a host cell transfected with an expression vector encoding such a variable region, under conditions that permit expression of the polypeptide. Following expression, the polypeptide can be harvested and purified or isolated using techniques known in the art, e.g., affinity tags such as glutathione-S-transferase (GST) or histidine tags.

[0218] In embodiments in which a fusion protein and/or antibody conjugate is produced, a sialidase fused to a monoclonal antibody, Fc domain, or an antigen-binding domain of the antibody, can be produced by growing (culturing) a host cell transfected with: (a) an expression vector that encodes a complete or partial immunoglobulin heavy chain, and a separate expression vector that encodes a complete or partial immunoglobulin light chain; or (b) a single expression vector that encodes both chains (e.g., complete or partial heavy and light chains), under conditions that permit expression of both chains. The sialidase will be fused to one or more of the chains. The intact fusion protein and/or antibody conjugate can be harvested and purified or isolated using techniques known in the art, e.g., Protein A, Protein G, affinity tags such as glutathione-S-transferase (GST) or histidine tags. It is within ordinary skill in the art to express the heavy chain and the light chain from a single expression vector or from two separate expression vectors.

[0219] In certain embodiments, in order to express a protein, e.g., a fusion protein, as a secreted protein, a native N-terminal signal sequence of the protein is replaced, e.g., with MDMRVPAQLLGLLLLWLPGARC (SEQ ID NO: 28). In certain embodiments, to express a protein, e.g., a fusion protein, as a secreted protein, an N-terminal signal sequence, e.g., MDMRVPAQLLGLLLLWLPGARC (SEQ ID NO: 28), is added. Additional exemplary N-terminal signal sequences include signal sequences from interleukin-2, CD-5, IgG kappa light chain, trypsinogen, serum albumin, and prolactin. In certain embodiments, in order to express a protein, e.g., a fusion protein, as a secreted protein, a C terminal lysosomal signal motif, e.g., YGTL (SEQ ID NO: 29) is removed.

[0220] Methods for reducing or eliminating the antigenicity of antibodies and antibody fragments are known in the art. When the antibodies are to be administered to a human, the antibodies preferably are “humanized” to reduce or eliminate antigenicity in humans. Preferably, each humanized antibody has the same or substantially the same affinity for the antigen as the non-humanized mouse antibody from which it was derived.

[0221] In one humanization approach, chimeric proteins are created in which mouse immunoglobulin constant regions are replaced with human immunoglobulin constant regions. See, e.g., Morrison et al., 1984, PROC. NAT. ACAD. SCI. 81:6851-6855, Neuberger et al., 1984, NATURE 312:604-608; U.S. Pat. No. 6,893,625 (Robinson); U.S. Pat. No. 5,500,362 (Robinson); and U.S. Pat. No. 4,816,567 (Cabilly).

[0222] In an approach known as CDR grafting, the CDRs of the light and heavy chain variable regions are grafted into frameworks from another species. For example, murine CDRs can be grafted into human FRs. In some embodiments, the CDRs of the light and heavy chain variable regions of an antibody are grafted into human FRs or consensus human FRs. To create consensus human FRs, FRs from several human heavy chain or light chain amino acid sequences are aligned to identify a consensus amino acid sequence. CDR grafting is described in U.S. Pat. No. 7,022,500 (Queen); U.S. Pat. No. 6,982,321 (Winter); U.S. Pat. No. 6,180,370 (Queen); U.S. Pat. No. 6,054,297 (Carter); U.S. Pat. No. 5,693,762 (Queen); U.S. Pat. No. 5,859,205 (Adair); U.S. Pat. No. 5,693,761 (Queen); U.S. Pat. No. 5,565,332 (Hoogenboom); U.S. Pat. No. 5,585,089 (Queen); U.S. Pat. No. 5,530,101 (Queen); Jones et al. (1986) NATURE 321: 522-525; Riechmann et al. (1988) NATURE 332: 323-327; Verhoeyen et al. (1988) SCIENCE 239: 1534-1536; and Winter (1998) FEBS LETT 430: 92-94.

[0223] In an approach called “SUPERHUMANIZATION™,” human CDR sequences are chosen from human germline genes, based on the structural similarity of the human CDRs to those of the mouse antibody to be humanized. See, e.g., U.S. Pat. No. 6,881,557 (Foote); and Tan et al., 2002, J. IMMUNOL. 169:1119-1125.

[0224] Other methods to reduce immunogenicity include “reshaping,” “hyperchimerization,” and “veneering/resurfacing.” See, e.g., Vaswami et al., 1998, ANNALS OF ALLERGY, ASTHMA, & IMMUNOL. 81:105; Roguska et al., 1996, PROT. ENGINEER 9:895-904; and U.S. Pat. No. 6,072,035 (Hardman). In the veneering/resurfacing approach, the surface accessible amino acid residues in the murine antibody are replaced by amino acid residues more frequently found at the same positions in a human antibody. This type of antibody resurfacing is described, e.g., in U.S. Pat. No. 5,639,641 (Pedersen).

[0225] Another approach for converting a mouse antibody into a form suitable for medical use in humans is known as ACTIVMAB™ technology (Vaccinex, Inc., Rochester, N.Y.), which involves a vaccinia virus-based vector to express antibodies in mammalian cells. High levels of combinatorial diversity of IgG heavy and light chains can be produced. See, e.g., U.S. Pat. No. 6,706,477 (Zauderer); U.S. Pat. No. 6,800,442 (Zauderer); and U.S. Pat. No. 6,872,518 (Zauderer). Another approach for converting a mouse antibody into a form suitable for use in humans is technology practiced commercially by KaloBios Pharmaceuticals, Inc. (Palo Alto, Calif.). This technology involves the use of a proprietary human “acceptor” library to produce an “epitope focused” library for antibody selection. Another approach for modifying a mouse antibody into a form suitable for medical use in humans is HUMAN ENGINEERING™ technology, which is practiced commercially by XOMA (US) LLC. See, e.g., International (PCT) Publication No. WO 93/11794 and U.S. Pat. No. 5,766,886 (Studnicka); U.S. Pat. No. 5,770,196 (Studnicka); U.S. Pat. No. 5,821,123 (Studnicka); and U.S. Pat. No. 5,869,619 (Studnicka).

[0226] Any suitable approach, including any of the above approaches, can be used to reduce or eliminate human immunogenicity of an antibody.

[0227] In addition, it is possible to create fully human antibodies in mice. Fully human mAbs lacking any non-human sequences can be prepared from human immunoglobulin transgenic mice by techniques referenced in, e.g., Lonberg et al., NATURE 368:856-859, 1994; Fishwild et al., NATURE BIOTECHNOLOGY 14:845-851, 1996; and Mendez et al., NATURE GENETICS 15:146-156, 1997. Fully human monoclonal antibodies can also be prepared and optimized from phage display libraries by techniques referenced in, e.g., Knappik et al., J. MOL. BIOL. 296:57-86, 2000; and Krebs et al., J. IMMUNOL. METH. 254:67-84 2001).

[0228] The present invention encompasses fusion proteins comprising antibody fragments, which may be generated by traditional means, such as enzymatic digestion, or by recombinant techniques. For a review of certain antibody fragments, see Hudson et al. (2003) NAT. MED. 9:129-134.

[0229] Various techniques have been developed for the production of antibody fragments. Traditionally, these fragments were derived via proteolytic digestion of intact antibodies (see, e.g., Morimoto et al. (1992) JOURNAL OF BIOCHEMICAL AND BIOPHYSICAL METHODS 24:107-117; and Brennan et al. (1985) SCIENCE 229:81). However, these fragments can now be produced directly by recombinant host cells. Fab, Fv and ScFv antibody fragments can all be expressed in and secreted from E. coli, thus allowing the facile production of large amounts of these fragments. Antibody fragments can be isolated from the antibody phage libraries. Alternatively, Fab′-SH fragments can be directly recovered from E. coli and chemically coupled to form F(ab′)₂ fragments (Carter et al. (1992) BIO/TECHNOLOGY 10:163-167). According to another approach, F(ab′)₂ fragments can be isolated directly from recombinant host cell culture. Fab and F(ab′)₂ fragments with increased in vivo half-life comprising salvage receptor binding epitope residues are described in U.S. Pat. No. 5,869,046. Other techniques for the production of antibody fragments will be apparent to the skilled practitioner. In certain embodiments, an antibody is a single chain Fv fragment (scFv). See U.S. Pat. Nos. 5,571,894 and 5,587,458.

[0230] Methods for making bispecific antibodies are known in the art. See Milstein and Cuello (1983) NATURE 305:537, International (PCT) Publication No. WO93/08829, and Traunecker et al. (1991) EMBO J., 10:3655. For further details of generating bispecific antibodies see, for example, Suresh et al. (1986) METHODS ENZYMOL. 121:210. Bispecific antibodies include cross-linked or “heteroconjugate” or “heterodimer” antibodies. For example, one of the antibodies in the heterodimer can be coupled to avidin, the other to biotin. Heterodimer antibodies may be made using any convenient cross-linking method. Suitable cross-linking agents are well known in the art, and are disclosed in U.S. Pat. No. 4,676,980, along with a number of cross-linking techniques.

[0231] Examples of heterodimeric or asymmetric IgG-like molecules include but are not limited to those obtained with the following technologies or using the following formats: Triomab/Quadroma, Knobs-into-Holes, CrossMabs, electrostatically-matched antibodies, LUZ-Y, Strand Exchange Engineered Domain body, Biclonic and DuoBody.

[0232] Advantages of using antibody fragments (e.g., F(ab) and F(ab′)2 fragments) include the elimination of non-specific binding between Fc portions of antibodies and Fc receptors on cells (such as macrophages, dendritic cells, neutrophils, NK cells and B cells). In addition, they may be able to penetrate tissues more efficiently due to their smaller size.

[0233] Heterodimeric antibodies, or asymmetric antibodies, allow for greater flexibility and new formats for attaching a variety of drugs to the antibody arms. One of the general formats for creating a heterodimeric antibody is the “knobs-into-holes” format. This format is specific to the heavy chain part of the constant region in antibodies. The “knobs” part is engineered by replacing a small amino acid with a larger one, which fits into a “hole”, which is engineered by replacing a large amino acid with a smaller one. What connects the “knobs” to the “holes” are the disulfide bonds between each chain. The “knobs-into-holes” shape facilitates antibody dependent cell mediated cytotoxicity. Single chain variable fragments (scFv) are connected to the variable domain of the heavy and light chain via a short linker peptide. The linker is rich in glycine, which gives it more flexibility, and serine/threonine, which gives it specificity. Two different scFv fragments can be connected together, via a hinge region, to the constant domain of the heavy chain or the constant domain of the light chain. This gives the antibody bispecificity, allowing for the binding specificities of two different antigens. The “knobs-into-holes” format enhances heterodimer formation but doesn't suppress homodimer formation.

[0234] Several approaches to support heterodimerization have been described, for example in International (PCT) Publication Nos. WO96/27011, WO98/050431, WO2007/110205, WO2007/147901, WO2009/089004, WO2010/129304, WO2011/90754, WO2011/143545, WO2012/058768, WO2013/157954, and WO2013/096291, and European Patent Publication No. EP1870459. Typically, in the approaches known in the art, the CH₃ domain of the first heavy chain and the CH₃ domain of the second heavy chain are both engineered in a complementary manner so that the heavy chain comprising one engineered CH₃ domain can no longer homodimerize with another heavy chain of the same structure (e.g. a CH₃-engineered first heavy chain can no longer homodimerize with another CH₃-engineered first heavy chain; and a CH₃-engineered second heavy chain can no longer homodimerize with another CH₃-engineered second heavy chain). Thereby the heavy chain comprising one engineered CH₃ domain is forced to heterodimerize with another heavy chain comprising the CH₃ domain, which is engineered in a complementary manner. As a result, the CH₃ domain of the first heavy chain and the CH₃ domain of the second heavy chain are engineered in a complementary manner by amino acid substitutions, such that the first heavy chain and the second heavy chain are forced to heterodimerize, whereas the first heavy chain and the second heavy chain can no longer homodimerize (e.g., for steric reasons).

### III. Pharmaceutical Compositions

[0235] For therapeutic use, a fusion protein and/or antibody conjugate preferably is combined with a pharmaceutically acceptable carrier. The term “pharmaceutically acceptable” as used herein refers to those compounds, materials, compositions, and/or dosage forms which are, within the scope of sound medical judgment, suitable for use in contact with the tissues of human beings and animals without excessive toxicity, irritation, allergic response, or other problem or complication, commensurate with a reasonable benefit/risk ratio.

[0236] The term “pharmaceutically acceptable carrier” as used herein refers to buffers, carriers, and excipients suitable for use in contact with the tissues of human beings and animals without excessive toxicity, irritation, allergic response, or other problem or complication, commensurate with a reasonable benefit/risk ratio. Pharmaceutically acceptable carriers include any of the standard pharmaceutical carriers, such as a phosphate buffered saline solution, water, emulsions (e.g., such as an oil/water or water/oil emulsions), and various types of wetting agents. The compositions also can include stabilizers and preservatives. For examples of carriers, stabilizers and adjuvants, see, e.g., Martin, Remington's Pharmaceutical Sciences, 15th Ed., Mack Publ. Co., Easton, Pa. [1975]. Pharmaceutically acceptable carriers include buffers, solvents, dispersion media, coatings, isotonic and absorption delaying agents, and the like, that are compatible with pharmaceutical administration. The use of such media and agents for pharmaceutically active substances is known in the art.

[0237] In certain embodiments, a pharmaceutical composition may contain formulation materials for modifying, maintaining or preserving, for example, the pH, osmolarity, viscosity, clarity, color, isotonicity, odor, sterility, stability, rate of dissolution or release, adsorption or penetration of the composition. In such embodiments, suitable formulation materials include, but are not limited to, amino acids (such as glycine, glutamine, asparagine, arginine or lysine); antimicrobials; antioxidants (such as ascorbic acid, sodium sulfite or sodium hydrogen-sulfite); buffers (such as borate, bicarbonate, Tris-HCl, citrates, phosphates or other organic acids); bulking agents (such as mannitol or glycine); chelating agents (such as ethylenediamine tetraacetic acid (EDTA)); complexing agents (such as caffeine, polyvinylpyrrolidone, beta-cyclodextrin or hydroxypropyl-beta-cyclodextrin); fillers; monosaccharides; disaccharides; and other carbohydrates (such as glucose, mannose or dextrins); proteins (such as serum albumin, gelatin or immunoglobulins); coloring, flavoring and diluting agents; emulsifying agents; hydrophilic polymers (such as polyvinylpyrrolidone); low molecular weight polypeptides; salt-forming counterions (such as sodium); preservatives (such as benzalkonium chloride, benzoic acid, salicylic acid, thimerosal, phenethyl alcohol, methylparaben, propylparaben, chlorhexidine, sorbic acid or hydrogen peroxide); solvents (such as glycerin, propylene glycol or polyethylene glycol); sugar alcohols (such as mannitol or sorbitol); suspending agents; surfactants or wetting agents (such as pluronics, PEG, sorbitan esters, polysorbates such as polysorbate 20, polysorbate, triton, tromethamine, lecithin, cholesterol, tyloxapal); stability enhancing agents (such as sucrose or sorbitol); tonicity enhancing agents (such as alkali metal halides, preferably sodium or potassium chloride, mannitol sorbitol); delivery vehicles; diluents; excipients and/or pharmaceutical adjuvants (see, Remington's Pharmaceutical Sciences, 18th ed. (Mack Publishing Company, 1990).

[0238] In certain embodiments, a pharmaceutical composition may contain nanoparticles, e.g., polymeric nanoparticles, liposomes, or micelles (See Anselmo et al. (2016) BIOENG. TRANSL. MED. 1: 10-29).

[0239] In certain embodiments, a pharmaceutical composition may contain a sustained- or controlled-delivery formulation. Techniques for formulating sustained- or controlled-delivery means, such as liposome carriers, bio-erodible microparticles or porous beads and depot injections, are also known to those skilled in the art. Sustained-release preparations may include, e.g., porous polymeric microparticles or semipermeable polymer matrices in the form of shaped articles, e.g., films, or microcapsules. Sustained release matrices may include polyesters, hydrogels, polylactides, copolymers of L-glutamic acid and gamma ethyl-L-glutamate, poly (2-hydroxyethyl-methacrylate), ethylene vinyl acetate, or poly-D(−)-3-hydroxybutyric acid. Sustained release compositions may also include liposomes that can be prepared by any of several methods known in the art.

[0240] Pharmaceutical compositions containing a sialidase fusion protein or an antibody conjugate disclosed herein can be presented in a dosage unit form and can be prepared by any suitable method. A pharmaceutical composition should be formulated to be compatible with its intended route of administration. Examples of routes of administration are intravenous (IV), intradermal, inhalation, transdermal, topical, transmucosal, intrathecal and rectal administration. In certain embodiments, a sialidase fusion protein or an antibody conjugate disclosed herein is administered by IV infusion. In certain embodiments, a sialidase fusion protein or an antibody conjugate disclosed herein is administered by intratumoral injection. Useful formulations can be prepared by methods known in the pharmaceutical art. For example, see Remington's Pharmaceutical Sciences, 18th ed. (Mack Publishing Company, 1990). Formulation components suitable for parenteral administration include a sterile diluent such as water for injection, saline solution, fixed oils, polyethylene glycols, glycerin, propylene glycol or other synthetic solvents; antibacterial agents such as benzyl alcohol or methyl parabens; antioxidants such as ascorbic acid or sodium bisulfite; chelating agents such as EDTA; buffers such as acetates, citrates or phosphates; and agents for the adjustment of tonicity such as sodium chloride or dextrose.

[0241] For intravenous administration, suitable carriers include physiological saline, bacteriostatic water, Cremophor EL™ (BASF, Parsippany, N.J.) or phosphate buffered saline (PBS). The carrier should be stable under the conditions of manufacture and storage, and should be preserved against microorganisms. The carrier can be a solvent or dispersion medium containing, for example, water, ethanol, polyol (for example, glycerol, propylene glycol, and liquid polyethylene glycol), and suitable mixtures thereof.

[0242] In certain embodiments, a pharmaceutical composition may contain a stabilizing agent. In certain embodiments, the stabilizing agent is a cation, such as a divalent cation. In certain embodiments, the cation is calcium or magnesium. The cation can be in the form of a salt, such as calcium chloride (CaCl₂) or magnesium chloride (MgCl₂).

[0243] In certain embodiments, the stabilizing agent is present in an amount from about 0.05 mM to about 5 mM. For example, the stabilizing agent may be present in an amount of from about 0.05 mM to about 4 mM, from about 0.05 mM to about 3 mM, from about 0.05 mM to about 2 mM, from about 0.05 mM to about 1 mM, from about 0.05 mM to about 0.5 mM, from about 0.5 mM to about 4 mM, from about 0.5 mM to about 3 mM, from about 0.5 mM to about 2 mM, from about 0.5 mM to about 1 mM, from about 1 mM to about 4 mM, from about 1 mM to about 3 mM, of from about 1 mM to about 2 mM.

[0244] Pharmaceutical formulations preferably are sterile. Sterilization can be accomplished by any suitable method, e.g., filtration through sterile filtration membranes. Where the composition is lyophilized, filter sterilization can be conducted prior to or following lyophilization and reconstitution.

[0245] The compositions described herein may be administered locally or systemically. Administration will generally be parenteral administration. In a preferred embodiment, the pharmaceutical composition is administered subcutaneously and in an even more preferred embodiment intravenously. Preparations for parenteral administration include sterile aqueous or non-aqueous solutions, suspensions, and emulsions.

[0246] Generally, a therapeutically effective amount of active component, for example, a fusion protein and/or antibody conjugate, is in the range of 0.1 mg/kg to 100 mg/kg, e.g., 1 mg/kg to 100 mg/kg, 1 mg/kg to 10 mg/kg. The amount administered will depend on variables such as the type and extent of disease or indication to be treated, the overall health of the patient, the in vivo potency of the antibody, the pharmaceutical formulation, and the route of administration. The initial dosage can be increased beyond the upper level in order to rapidly achieve the desired blood-level or tissue-level. Alternatively, the initial dosage can be smaller than the optimum, and the daily dosage may be progressively increased during the course of treatment. Human dosage can be optimized, e.g., in a conventional Phase I dose escalation study designed to run from 0.5 mg/kg to 20 mg/kg. Dosing frequency can vary, depending on factors such as route of administration, dosage amount, serum half-life of the fusion protein and/or antibody conjugate, and the disease being treated. Exemplary dosing frequencies are once per day, once per week and once every two weeks. A preferred route of administration is parenteral, e.g., intravenous infusion. In certain embodiments, a fusion protein and/or antibody conjugate is lyophilized, and then reconstituted in buffered saline, at the time of administration.

### IV. Therapeutic Uses

[0247] The compositions and methods disclosed herein can be used to treat various forms of cancer in a subject or inhibit cancer growth in a subject. The invention provides a method of treating a cancer in a subject. The method comprises administering to the subject an effective amount of a sialidase anti-HER2 fusion protein and/or antibody conjugate, e.g., a fusion protein or antibody conjugate disclosed herein, either alone or in a combination with another therapeutic agent to treat the cancer in the subject. The term “effective amount” as used herein refers to the amount of an active agent (e.g., fusion protein according to the present invention) sufficient to effect beneficial or desired results. An effective amount can be administered in one or more administrations, applications or dosages and is not intended to be limited to a particular formulation or administration route.

[0248] As used herein, “treat”, “treating” and “treatment” mean the treatment of a disease in a subject, e.g., in a human. This includes: (a) inhibiting the disease, i.e., arresting its development; and (b) relieving the disease, i.e., causing regression of the disease state. As used herein, the terms “subject” and “patient” refer to an organism to be treated by the methods and compositions described herein. Such organisms preferably include, but are not limited to, mammals (e.g., murines, simians, equines, bovines, porcines, canines, felines, and the like), and more preferably includes humans.

[0249] Examples of cancers include solid tumors, soft tissue tumors, hematopoietic tumors and metastatic lesions. Examples of hematopoietic tumors include, leukemia, acute leukemia, acute lymphoblastic leukemia (ALL), B-cell, T-cell or FAB ALL, acute myeloid leukemia (AML), chronic myelocytic leukemia (CML), chronic lymphocytic leukemia (CLL), e.g., transformed CLL, diffuse large B-cell lymphomas (DLBCL), follicular lymphoma, hairy cell leukemia, myelodyplastic syndrome (MDS), a lymphoma, Hodgkin's disease, a malignant lymphoma, non-Hodgkin's lymphoma, Burkitt's lymphoma, multiple myeloma, or Richter's Syndrome (Richter's Transformation). Examples of solid tumors include malignancies, e.g., sarcomas, adenocarcinomas, and carcinomas, of the various organ systems, such as those affecting head and neck (including pharynx), thyroid, lung (small cell or non-small cell lung carcinoma (NSCLC)), breast, lymphoid, gastrointestinal (e.g., oral, esophageal, stomach, liver, pancreas, small intestine, colon and rectum, anal canal), genitals and genitourinary tract (e.g., renal, urothelial, bladder, ovarian, uterine, cervical, endometrial, prostate, testicular), CNS (e.g., neural or glial cells, e.g., neuroblastoma or glioma), or skin (e.g., melanoma).

[0250] In certain embodiments the cancer is an epithelial cancer, e.g., an epithelial cancer that upregulates the expression of sialylated glycans. Exemplary epithelial cancers include, but are not limited to, endometrial cancer, colon cancer, ovarian cancer, cervical cancer, vulvar cancer, uterine cancer or fallopian tube cancer, breast cancer, prostate cancer, lung cancer, pancreatic cancer, urinary cancer, bladder cancer, head and neck cancer, oral cancer and liver cancer. Epithelial cancers also include carcinomas, for example, acinar carcinoma, acinous carcinoma, adenocystic carcinoma, adenoid cystic carcinoma, carcinoma adenomatosum, carcinoma of adrenal cortex, alveolar carcinoma, alveolar cell carcinoma, basal cell carcinoma, carcinoma basocellulare, basaloid carcinoma, baso squamous cell carcinoma, bronchioalveolar carcinoma, bronchiolar carcinoma, bronchogenic carcinoma, cerebriform carcinoma, cholangiocellular carcinoma, chorionic carcinoma, colloid carcinoma, comedo carcinoma, corpus carcinoma, cribriform carcinoma, carcinoma en cuirasse, carcinoma cutaneum, cylindrical carcinoma, cylindrical cell carcinoma, duct carcinoma, carcinoma durum, embryonal carcinoma, encephaloid carcinoma, epiermoid carcinoma, carcinoma epitheliale adenoides, exophytic carcinoma, carcinoma ex ulcere, carcinoma fibrosum, gelatiniforni carcinoma, gelatinous carcinoma, giant cell carcinoma, carcinoma gigantocellulare, glandular carcinoma, granulosa cell carcinoma, hair-matrix carcinoma, hematoid carcinoma, hepatocellular carcinoma, Hurthle cell carcinoma, hyaline carcinoma, hypemephroid carcinoma, infantile embryonal carcinoma, carcinoma in situ, intraepidermal carcinoma, intraepithelial carcinoma, Krompecher's carcinoma, Kulchitzky-cell carcinoma, large-cell carcinoma, lenticular carcinoma, carcinoma lenticulare, lipomatous carcinoma, lymphoepithelial carcinoma, carcinoma medullare, medullary carcinoma, melanotic carcinoma, carcinoma molle, mucinous carcinoma, carcinoma muciparum, carcinoma mucocellulare, mucoepidermoid carcinoma, carcinoma mucosum, mucous carcinoma, carcinoma myxomatodes, nasopharyngeal carcinoma, oat cell carcinoma, carcinoma ossifi cans, osteoid carcinoma, papillary carcinoma, periportal carcinoma, preinvasive carcinoma, prickle cell carcinoma, pultaceous carcinoma, renal cell carcinoma of kidney, reserve cell carcinoma, carcinoma sarcomatodes, schneiderian carcinoma, scirrhous carcinoma, carcinoma scroti, signet-ring cell carcinoma, carcinoma simplex, small-cell carcinoma, solanoid carcinoma, spheroidal cell carcinoma, spindle cell carcinoma, carcinoma spongiosum, squamous carcinoma, squamous cell carcinoma, string carcinoma, carcinoma telangiectaticum, carcinoma telangiectodes, transitional cell carcinoma, carcinoma tuberosum, tuberous carcinoma, verrucous carcinoma, and carcinoma villosum.

[0251] In certain embodiments the cancer is selected from lung bronchioloalveolar carcinoma (BAC), bladder cancer, a female genital tract malignancy (e.g., uterine serous carcinoma, endometrial carcinoma, vulvar squamous cell carcinoma, and uterine sarcoma), an ovarian surface epithelial carcinoma (e.g., clear cell carcinoma of the ovary, epithelial ovarian cancer, fallopian tube cancer, and primary peritoneal cancer), breast carcinoma, non-small cell lung cancer (NSCLC), a male genital tract malignancy (e.g., testicular cancer), retroperitoneal or peritoneal carcinoma, gastroesophageal adenocarcinoma, esophagogastric junction carcinoma, liver hepatocellular carcinoma, esophageal and esophagogastric junction carcinoma, cervical cancer, cholangiocarcinoma, pancreatic adenocarcinoma, extrahepatic bile duct adenocarcinoma, a small intestinal malignancy, gastric adenocarcinoma, cancer of unknown primary (CUP), colorectal adenocarcinoma, esophageal carcinoma, prostatic adenocarcinoma, kidney cancer, head and neck squamous carcinoma, thymic carcinoma, non-melanoma skin cancer, thyroid carcinoma (e.g., papillary carcinoma), a head and neck cancer, anal carcinoma, non-epithelial ovarian cancer (non-EOC), uveal melanoma, malignant pleural mesothelioma, small cell lung cancer (SCLC), a central nervous system cancer, a neuroendocrine tumor, and a soft tissue tumor.

[0252] In certain embodiments, the cancer is melanoma, non-small cell lung cancer, colon cancer, breast cancer, bladder cancer, or kidney cancer.

[0253] In certain embodiments, the cancer is an adenocarcinoma. In certain embodiments, the cancer is a metastatic cancer. In certain embodiments, the cancer is a refractory cancer.

[0254] In certain embodiments, the cancer is resistant to or non-responsive to treatment with an antibody, e.g., an antibody with ADCC activity, e.g., trastuzumab.

[0255] The methods and compositions described herein can be used alone or in combination with other therapeutic agents and/or modalities. The term administered “in combination,” as used herein, is understood to mean that two (or more) different treatments are delivered to the subject during the course of the subject's affliction with the disorder, such that the effects of the treatments on the patient overlap at a point in time. In certain embodiments, the delivery of one treatment is still occurring when the delivery of the second begins, so that there is overlap in terms of administration. This is sometimes referred to herein as “simultaneous” or “concurrent delivery.” In other embodiments, the delivery of one treatment ends before the delivery of the other treatment begins. In certain embodiments of either case, the treatment is more effective because of combined administration. For example, the second treatment is more effective, e.g., an equivalent effect is seen with less of the second treatment, or the second treatment reduces symptoms to a greater extent, than would be seen if the second treatment were administered in the absence of the first treatment, or the analogous situation is seen with the first treatment. In certain embodiments, delivery is such that the reduction in a symptom, or other parameter related to the disorder is greater than what would be observed with one treatment delivered in the absence of the other. The effect of the two treatments can be partially additive, wholly additive, or greater than additive. The delivery can be such that an effect of the first treatment delivered is still detectable when the second is delivered.

[0256] In certain embodiments, a method or composition described herein, is administered in combination with one or more additional therapies, e.g., surgery, radiation therapy, or administration of another therapeutic preparation. In certain embodiments, the additional therapy may include chemotherapy, e.g., a cytotoxic agent. In certain embodiments the additional therapy may include a targeted therapy, e.g. a tyrosine kinase inhibitor, a proteasome inhibitor, or a protease inhibitor. In certain embodiments, the additional therapy may include an anti-inflammatory, anti-angiogenic, anti-fibrotic, or anti-proliferative compound, e.g., a steroid, a biologic immunomodulator, a monoclonal antibody, an antibody fragment, an aptamer, an siRNA, an antisense molecule, a fusion protein, a cytokine, a cytokine receptor, a bronchodialator, a statin, an anti-inflammatory agent (e.g. methotrexate), or an NSAID. In certain embodiments, the additional therapy may include a combination of therapeutics of different classes.

[0257] In certain embodiments, a method or composition described herein is administered in combination with a checkpoint inhibitor. The checkpoint inhibitor may, for example, be selected from a PD-1 antagonist, PD-L1 antagonist, CTLA-4 antagonist, adenosine A2A receptor antagonist, B7-H3 antagonist, B7-H4 antagonist, BTLA antagonist, KIR antagonist, LAG3 antagonist, TIM-3 antagonist, VISTA antagonist or TIGIT antagonist.

[0258] In certain embodiments, the checkpoint inhibitor is a PD-1 or PD-L1 inhibitor. PD-1 is a receptor present on the surface of T-cells that serves as an immune system checkpoint that inhibits or otherwise modulates T-cell activity at the appropriate time to prevent an overactive immune response. Cancer cells, however, can take advantage of this checkpoint by expressing ligands, for example, PD-L1, that interact with PD-1 on the surface of T-cells to shut down or modulate T-cell activity. Exemplary PD-1/PD-L1 based immune checkpoint inhibitors include antibody based therapeutics. Exemplary treatment methods that employ PD-1/PD-L1 based immune checkpoint inhibition are described in U.S. Pat. Nos. 8,728,474 and 9,073,994, and EP Patent No. 1537878B1, and, for example, include the use of anti-PD-1 antibodies. Exemplary anti-PD-1 antibodies are described, for example, in U.S. Pat. Nos. 8,952,136, 8,779,105, 8,008,449, 8,741,295, 9,205,148, 9,181,342, 9,102,728, 9,102,727, 8,952,136, 8,927,697, 8,900,587, 8,735,553, and 7,488,802. Exemplary anti-PD-1 antibodies include, for example, nivolumab (Opdivo®, Bristol-Myers Squibb Co.), pembrolizumab (Keytruda®, Merck Sharp & Dohme Corp.), PDR001 (Novartis Pharmaceuticals), and pidilizumab (CT-011, Cure Tech). Exemplary anti-PD-L1 antibodies are described, for example, in U.S. Pat. Nos. 9,273,135, 7,943,743, 9,175,082, 8,741,295, 8,552,154, and 8,217,149. Exemplary anti-PD-L1 antibodies include, for example, atezolizumab (Tecentriq®, Genentech), durvalumab (AstraZeneca), MEDI4736, avelumab, and BMS 936559 (Bristol Myers Squibb Co.).

[0259] In certain embodiments, a method or composition described herein is administered in combination with a CTLA-4 inhibitor. In the CTLA-4 pathway, the interaction of CTLA-4 on a T-cell with its ligands (e.g., CD80, also known as B7-1, and CD86) on the surface of an antigen presenting cells (rather than cancer cells) leads to T-cell inhibition. Exemplary CTLA-4 based immune checkpoint inhibition methods are described in U.S. Pat. Nos. 5,811,097, 5,855,887, 6,051,227. Exemplary anti-CTLA-4 antibodies are described in U.S. Pat. Nos. 6,984,720, 6,682,736, 7,311,910; 7,307,064, 7,109,003, 7,132,281, 6,207,156, 7,807,797, 7,824,679, 8,143,379, 8,263,073, 8,318,916, 8,017,114, 8,784,815, and 8,883,984, International (PCT) Publication Nos. WO98/42752, WO00/37504, and WO01/14424, and European Patent No. EP 1212422 B1. Exemplary CTLA-4 antibodies include ipilimumab or tremelimumab.

[0260] In certain embodiments, a method or composition described herein is administered in combination with (i) a PD-1 or PD-L1 inhibitor, e.g., a PD-1 or PD-L1 inhibitor disclosed herein, and (ii) CTLA-4 inhibitor, e.g., a CTLA-4 inhibitor disclosed herein.

[0261] In certain embodiments, a method or composition described herein is administered in combination with an DO inhibitor. Exemplary DO inhibitors include 1-methyl-D-tryptophan (known as indoximod), epacadostat (INCB24360), navoximod (GDC-0919), and BMS-986205.

[0262] Exemplary cytotoxic agents that can be administered in combination with a method or composition described herein include, for example, antimicrotubule agents, topoisomerase inhibitors, antimetabolites, protein synthesis and degradation inhibitors, mitotic inhibitors, alkylating agents, platinating agents, inhibitors of nucleic acid synthesis, histone deacetylase inhibitors (HDAC inhibitors, e.g., vorinostat (SAHA, MK0683), entinostat (MS-275), panobinostat (LBH589), trichostatin A (TSA), mocetinostat (MGCD0103), belinostat (PXD101), romidepsin (FK228, depsipeptide)), DNA methyltransferase inhibitors, nitrogen mustards, nitrosoureas, ethylenimines, alkyl sulfonates, triazenes, folate analogs, nucleoside analogs, ribonucleotide reductase inhibitors, vinca alkaloids, taxanes, epothilones, intercalating agents, agents capable of interfering with a signal transduction pathway, agents that promote apoptosis and radiation, or antibody molecule conjugates that bind surface proteins to deliver a toxic agent. In one embodiment, the cytotoxic agent that can be administered with a method or composition described herein is a platinum-based agent (such as cisplatin), cyclophosphamide, dacarbazine, methotrexate, fluorouracil, gemcitabine, capecitabine, hydroxyurea, topotecan, irinotecan, azacytidine, vorinostat, ixabepilone, bortezomib, taxanes (e.g., paclitaxel or docetaxel), cytochalasin B, gramicidin D, ethidium bromide, emetine, mitomycin, etoposide, tenoposide, vincristine, vinblastine, vinorelbine, colchicin, anthracyclines (e.g., doxorubicin or epirubicin) daunorubicin, dihydroxy anthracin dione, mitoxantrone, mithramycin, actinomycin D, adriamycin, 1-dehydrotestosterone, glucocorticoids, procaine, tetracaine, lidocaine, propranolol, puromycin, ricin, or maytansinoids.

[0263] The invention also provides a method of increasing the expression of HLA-DR, CD86, CD83, IFNγ, IL-1b, IL-6, TNFα, IL-17A, IL-2, or IL-6 in a cell, tissue, or subject. The method comprises contacting the cell, tissue, or subject with an effective amount of a fusion protein and/or antibody conjugate, e.g., a fusion protein or antibody conjugate disclosed herein. In certain embodiments, the cell is selected from a dendritic cell and a peripheral blood mononuclear cell (PBMC).

[0264] In certain embodiments, expression of HLA-DR, CD86, CD83, IFNγ, IL-1b, IL-6, TNFα, IL-17A, IL-2, or IL-6 in the cell, tissue, or subject is increased by at least about 10%, at least about 20%, at least about 50%, at least about 75%, at least about 100%, at least about 150%, at least about 200%, at least about 250%, at least about 300%, at least about 400%, at least about 500%, at least about 600%, at least about 700%, at least about 800%, at least about 900%, or at least about 1,000%, relative to a similar or otherwise identical cell or tissue that has not been contacted with the fusion protein or antibody conjugate. Gene expression may be measured by any suitable method known in the art, for example, by ELISA, or by Luminex multiplex assays.

[0265] The invention also provides a method of promoting infiltration of immune cells into a tumor in a subject in need thereof. The method comprises administering to the subject an effective amount of a fusion protein and/or antibody conjugate, e.g., a fusion protein or antibody conjugate disclosed herein. In certain embodiments, the immune cells are T-cells, e.g., CD4+ and/or CD8+ T-cells, e.g., CD69⁺CD8⁺ and/or GzmB⁺CD8⁺ T-cells. In certain embodiments, the immune cells are natural killer (NK) cells.

[0266] In certain embodiments, the infiltration of immune cells into the tumor in the subject is increased by at least about 10%, at least about 20%, at least about 50%, at least about 75%, at least about 100%, at least about 150%, at least about 200%, at least about 250%, at least about 300%, at least about 400%, at least about 500%, at least about 600%, at least about 700%, at least about 800%, at least about 900%, or at least about 1,000%, relative to a similar or otherwise identical tumor and/or subject that has not been administered the fusion protein or antibody conjugate. Infiltration of immune cells into a tumor may be measured by any suitable method known in the art, for example, antibody staining as described in Example 12 herein.

[0267] The invention also provides a method of increasing the number of circulating natural killer (NK) cells in a subject in need thereof. The method comprises administering to the subject an effective amount of a fusion protein and/or antibody conjugate, e.g., a fusion protein or antibody conjugate disclosed herein, so as to increase the number of circulating NK cells relative to prior to administration of the fusion protein, antibody conjugate or pharmaceutical composition.

[0268] In certain embodiments, the number of circulating NK cells in the subject is increased by at least about 10%, at least about 20%, at least about 50%, at least about 75%, at least about 100%, at least about 150%, at least about 200%, at least about 250%, at least about 300%, at least about 400%, at least about 500%, at least about 600%, at least about 700%, at least about 800%, at least about 900%, or at least about 1,000%, relative to a similar or otherwise identical subject that has not been administered the fusion protein or antibody conjugate. Circulating NK cells in a subject may be measured by any suitable method known in the art, for example, antibody staining as described in Example 12 herein.

[0269] The invention also provides a method of increasing the number of T-cells in the draining lymph node in a subject in need thereof. The method comprises administering to the subject an effective amount of a fusion protein and/or antibody conjugate, e.g., a fusion protein or antibody conjugate disclosed herein, so as to increase the number of T-cells in the draining lymph node relative to prior to administration of the fusion protein, antibody conjugate or pharmaceutical composition. In certain embodiments, the immune cells are T-cells, e.g., CD4+ and/or CD8+ T-cells.

[0270] In certain embodiments, the number of T-cells in the draining lymph node in the subject is increased by at least about 10%, at least about 20%, at least about 50%, at least about 75%, at least about 100%, at least about 150%, at least about 200%, at least about 250%, at least about 300%, at least about 400%, at least about 500%, at least about 600%, at least about 700%, at least about 800%, at least about 900%, or at least about 1,000%, relative to a similar or otherwise identical subject that has not been administered the fusion protein or antibody conjugate. T-cells in the draining lymph node in a subject may be measured by any suitable method known in the art, for example, antibody staining as described in Example 12 herein.

[0271] The invention also provides a method of increasing expression of Cd3, Cd4, Cd8, Cd274, Ctla4, Icos, Pdcd1, Lag3, Il6, Il1b, Il2, Ifng, Ifna1, Mx1, Gzmb, Cxcl9, Cxcl12, and/or Ccl5 in a cell, tissue, or subject. The method comprises contacting the cell, tissue, or subject with an effective amount of a fusion protein and/or antibody conjugate, e.g., a fusion protein or antibody conjugate disclosed herein, so as to increase the expression of Cd3, Cd4, Cd8, Cd274, Ctla4, Icos, Pdcd1, Lag3, Il6, Il1b, Il2, Ifng, Ifna1, Mx1, Gzmb, Cxcl9, Cxcl12, and/or Ccl5 relative to the cell, tissue or subject prior to contact with the fusion protein, antibody conjugate or pharmaceutical composition.

[0272] In certain embodiments, expression of Cd3, Cd4, Cd8, Cd274, Ctla4, Icos, Pdcd1, Lag3, Il6, Il1b, Il2, Ifng, Ifna1, Mx1, Gzmb, Cxcl9, Cxcl12, and/or Ccl5 in the cell, tissue, or subject is increased by at least about 10%, at least about 20%, at least about 50%, at least about 75%, at least about 100%, at least about 150%, at least about 200%, at least about 250%, at least about 300%, at least about 400%, at least about 500%, at least about 600%, at least about 700%, at least about 800%, at least about 900%, or at least about 1,000%, relative to a similar or otherwise identical cell, tissue, or subject that has not been contacted with the fusion protein or antibody conjugate. Gene expression may be measured by any suitable method known in the art, for example, by ELISA, Luminex multiplex assays, or Nanostring technology as described in Example 12 herein.

[0273] The invention also provides a method of removing sialic acid from a cell or tissue. The method comprises contacting the cell or tissue with an effective amount of a fusion protein and/or antibody conjugate, e.g., a fusion protein or antibody conjugate disclosed herein. The invention also provides a method of removing sialic acid from a cell in a subject, the method comprising administering to the subject an effective amount of a pharmaceutical composition comprising a fusion protein and/or antibody conjugate, e.g., a fusion protein or antibody conjugate disclosed herein, thereby to remove sialic acid from the cell.

[0274] In certain embodiments, the cell is tumor cell, dendritic cell (DC) or monocyte. In certain embodiments, the cell is a monocyte, and the method results in increased expression of an MHC-II molecule (e.g., HLA-DR) on the monocyte. In certain embodiments, expression of an MHC-II molecule in the cell or tissue is increased by at least about 10%, at least about 20%, at least about 50%, at least about 75%, at least about 100%, at least about 150%, at least about 200%, at least about 250%, at least about 300%, at least about 400%, at least about 500%, at least about 600%, at least about 700%, at least about 800%, at least about 900%, or at least about 1,000%, relative to a similar or otherwise identical cell or tissue that has not been contacted with the fusion protein and/or antibody conjugate. Gene expression may be measured by any suitable method known in the art, for example, by ELISA, by Luminex multiplex assays, or by flow cytometry.

[0275] The invention also provides a method of enhancing phagocytosis of a tumor cell. The method comprises contacting the tumor cell with a fusion protein and/or antibody conjugate, e.g., a fusion protein or antibody conjugate disclosed herein, in an amount effective to remove sialic acid from the tumor cell, thereby enhancing phagocytosis of the tumor cell. In certain embodiments, the disclosure relates to a method of increasing phagocytosis of a tumor cell in a subject, the method comprising administering to the subject an effective amount of a pharmaceutical composition a fusion protein and/or antibody conjugate, e.g., a fusion protein or antibody conjugate disclosed herein, in an amount effective to remove sialic acid from the tumor cell, thereby to increase phagocytosis of the tumor cell.

[0276] In certain embodiments, phagocytosis is increased by at least about 10%, at least about 20%, at least about 50%, at least about 75%, at least about 100%, at least about 150%, at least about 200%, at least about 250%, at least about 300%, at least about 400%, at least about 500%, at least about 600%, at least about 700%, at least about 800%, at least about 900%, or at least about 1,000%, relative to a similar or otherwise identical tumor cell or population of tumor cells that has not or have not been contacted with the fusion protein and/or antibody conjugate. Phagocytosis may be measured by any suitable method known in the art.

[0277] The invention also provides a method of activating a dendritic cell (DC). The method comprises contacting the DC with a tumor cell that has been treated with a fusion protein and/or antibody conjugate, e.g., a fusion protein or antibody conjugate disclosed herein. In certain embodiments, the disclosure relates to a method of activating a dendritic cell (DC) or a population of DCs in a subject, the method comprising administering to the subject an amount of a pharmaceutical composition comprising a fusion protein and/or antibody conjugate, e.g., a fusion protein or antibody conjugate disclosed herein, effective to remove sialic acid from a tumor cell in the subject, thereby to activate the DC or the population of DCs in the subject.

[0278] In certain embodiments, activation of the DC or a population of DCs is increased by at least about 10%, at least about 20%, at least about 50%, at least about 75%, at least about 100%, at least about 150%, at least about 200%, at least about 250%, at least about 300%, at least about 400%, at least about 500%, at least about 600%, at least about 700%, at least about 800%, at least about 900%, or at least about 1,000%, relative to a similar or otherwise identical DC or population of DCs that has not or have not been contacted with a tumor cell that has been treated with the fusion protein and/or antibody conjugate. Activation may be measured by any suitable method known in the art.

[0279] The invention also provides a method of reducing Siglec-15 binding activity, thereby to increase anti-tumor activity in a tumor microenvironment, the method comprising contacting a T cell with a fusion protein and/or antibody conjugate, e.g., a fusion protein or antibody conjugate disclosed herein. In certain embodiments, the disclosure relates to a method of reducing Siglec-15 binding activity, thereby to increase anti-tumor activity in a tumor microenvironment of a patient, the method comprising administering to the subject an effective amount of a pharmaceutical composition comprising a fusion protein and/or antibody conjugate, e.g., a fusion protein or antibody conjugate disclosed herein, thereby to increase anti-tumor activity (e.g., T cell activity) in the subject.

[0280] In certain embodiments, Siglec-15 binding activity is reduced by at least about 10%, at least about 20%, at least about 50%, at least about 75%, or about 100%, relative to Siglec-15 that has not or have not been contacted with the fusion protein and/or antibody conjugate. Binding may be measured by any suitable method known in the art.

[0281] Throughout the description, where compositions are described as having, including, or comprising specific components, or where processes and methods are described as having, including, or comprising specific steps, it is contemplated that, additionally, there are compositions of the present invention that consist essentially of, or consist of, the recited components, and that there are processes and methods according to the present invention that consist essentially of, or consist of, the recited processing steps.

[0282] In the application, where an element or component is said to be included in and/or selected from a list of recited elements or components, it should be understood that the element or component can be any one of the recited elements or components, or the element or component can be selected from a group consisting of two or more of the recited elements or components.

[0283] Further, it should be understood that elements and/or features of a composition or a method described herein can be combined in a variety of ways without departing from the spirit and scope of the present invention, whether explicit or implicit herein. For example, where reference is made to a particular compound, that compound can be used in various embodiments of compositions of the present invention and/or in methods of the present invention, unless otherwise understood from the context. In other words, within this application, embodiments have been described and depicted in a way that enables a clear and concise application to be written and drawn, but it is intended and will be appreciated that embodiments may be variously combined or separated without parting from the present teachings and invention(s). For example, it will be appreciated that all features described and depicted herein can be applicable to all aspects of the invention(s) described and depicted herein.

[0284] It should be understood that the expression “at least one of” includes individually each of the recited objects after the expression and the various combinations of two or more of the recited objects unless otherwise understood from the context and use. The expression “and/or” in connection with three or more recited objects should be understood to have the same meaning unless otherwise understood from the context.

[0285] The use of the term “include,” “includes,” “including,” “have,” “has,” “having,” “contain,” “contains,” or “containing,” including grammatical equivalents thereof, should be understood generally as open-ended and non-limiting, for example, not excluding additional unrecited elements or steps, unless otherwise specifically stated or understood from the context.

[0286] Where the use of the term “about” is before a quantitative value, the present invention also includes the specific quantitative value itself, unless specifically stated otherwise. As used herein, the term “about” refers to a ±10% variation from the nominal value unless otherwise indicated or inferred.

[0287] It should be understood that the order of steps or order for performing certain actions is immaterial so long as the present invention remain operable. Moreover, two or more steps or actions may be conducted simultaneously.

[0288] The use of any and all examples, or exemplary language herein, for example, “such as” or “including,” is intended merely to illustrate better the present invention and does not pose a limitation on the scope of the invention unless claimed. No language in the specification should be construed as indicating any non-claimed element as essential to the practice of the present invention.

### EXAMPLES

[0289] The following Examples are merely illustrative and are not intended to limit the scope or content of the invention in any way.

### Example 1

[0290] This example describes the construction of recombinant human sialidases (Neu1, Neu2, and Neu3).

[0291] The human sialidases Neu1, Neu2, Neu3 (isoform 1), and Neu4 (isoform 1) were expressed as secreted proteins with a 10×His tag. To express Neu1 as a secreted protein, the native N terminal signal peptide (MTGERPSTALPDRRWGPRILGFWGGCRVWVFAAIFLLLSLAASWSKA; SEQ ID NO: 27) was replaced by MDMRVPAQLLGLLLLWLPGARC (SEQ ID NO: 28), and the C terminal lysosomal signal motif (YGTL; SEQ ID NO: 29) was removed. To express Neu2, Neu3, and Neu4 as secreted proteins, the N terminal signal peptide MDMRVPAQLLGLLLLWLPGARC (SEQ ID NO: 28) was added to each.

[0292] Sialidases were expressed in a 200 mL transfection of HEK293F human cells in 24-well plates using the pCEP4 mammalian expression vector with an N-terminal 6×His tag. Sialidases were purified using Ni-NTA columns, quantified with a UV-Vis spectrophotometer (NanoDrop), and examined by SDS-PAGE as shown in FIG. 1. Neu1 expressed well, with a yield of ˜3 μg/ml, and was present primarily in a monomeric form. Neu2 and Neu3 expression each gave yields of ˜0.15 μg/mL and each were present primarily in a dimeric form. Neu4 had no detectable expression yield as measured by NanoDrop. Bacterial sialidase from Salmonella typhimurium (St-sialidase; SEQ ID NO: 30), which was used as a positive control for expression, gave a comparable yield to Neu1, and was present primarily in a monomeric form.

[0293] The activity of the recombinantly expressed sialidases was assayed by measuring the release of sialic acid from the fluorogenic substrate 4-methylumbelliferyl-N-acetylneuraminic acid (4MU-NeuAc). As shown in FIG. 2, Neu1 has no detectable activity above a no-enzyme control, which is consistent with previous reports indicating that Neu1 is inactive unless it is in complex with beta-galactosidase and protective protein/cathepsin A (PPCA). Neu2 and Neu3 were active. An enzyme kinetics assay was performed with Neu2 and Neu3. A fixed concentration of enzyme at 1 nM was incubated with fluorogenic substrate 4MU-NeuAc at concentrations ranging from 4000 μM to 7.8 μM. Assays were conducted at both acidic (pH 5.6) and neutral (pH 7) conditions. As shown in FIG. 3, both Neu2 and Neu3 were active at acidic and neutral conditions and showed enzyme kinetics that were comparable to those previously reported.

[0294] Most of the recombinantly expressed sialidases ran as aggregates or dimers on a non-reducing SDS-PAGE gel. Subsequent treatment with the reducing agent dithiothreitol (DTT) resulted in a monomeric form of the enzyme that ran at 42 kDa on a reducing SDS-PAGE gel (FIG. 1).

### Example 2

[0295] This example describes the construction of recombinant human sialidases with mutations that increase expression and/or activity of the sialidase.

### A. Rational Design

[0296] Structural and sequence analysis identified residues A93 and P62 of Neu2 as candidates for substitutions to increase solubility and/or expression. In particular, a comparison of homologous sialidase sequences showed a preference for D or E amino acid residues at positions corresponding to position 93 of Neu2, and a preference for G amino acid residues at positions corresponding to position 62 of Neu2.

[0297] The beta-propeller family of proteins are usually stabilized by extensive hydrogen bonding interactions at the N- and C-termini of the protein. A structural analysis revealed that Neu2, which is a member of the beta-propeller family, appears to lack these stabilizing interactions. In contrast, sialidases from Salmonella typhimurium and Micromonospora viridifaciens (the bacterial sialidase most homologous to human Neu2) have extensive hydrogen bonding interactions at their N- and C-termini. Accordingly, residues K9, V363, and L365 of Neu2 were mutated to promote hydrogen bonding between the N- and C-termini of Neu2.

### B. Phage Display

[0298] Neu2 was expressed in a phage display system allowing for screening of Neu2 variants for both expression level and resistance to heat denaturation. Neu2 with V6Y and I187K substitutions was used as a template for library preparation. Designed phage display libraries 1, 2, and 3 are depicted in TABLEs 10-12, respectively. Each library included all of the possible combinations of the mutations depicted. A fourth library included random mutations generated by error prone PCR.

TABLE 10
Phage Library 1

| Wild-Type | | | |
|---|---|---|---|
| Neu2 | | | |
| Amino | | Substituting | Codon |
| Acid(s) | Design | Amino Acids | Usage |
| 184-188 | Adjust length of 5 wild-type | S, N, R, K, T, G, | RVM |
| LHPIQ | residues from 2 to 5 and | D, E, A | |
| | substitute each residue with | | |
| | one of 9 polar amino acids | | |
| P190, | Substitute with one of 5 non- | F, I, L, M, V | NTK |
| I191 | polar amino acids | | |
| C219 | Substitute with one of 12 polar | R, N, D, C, G, H, | NDT |
| | or nonpolar amino acids | I, L, F, S, Y, V | |
| L217 | Substitute with one of 12 polar | R, N, D, C, G, H, | NDT |
| | or nonpolar amino acids | I, L, F, S, Y, V | |
| T216 and | Insert one of 12 polar or | S, T, Y, L, F, A, | NHT |
| L217 | nonpolar amino acids between | P, V, I, N, D, H | |
| | the wild-type amino acids | | |
| G271 | Substitute with one of 9 polar | S, N, R, K, T, G, | RVM |
| | amino acids | D, E, A | |
| C272 | Substitute with one of 9 polar | S, N, R, K, T, G, | RVM |
| | amino acids | D, E, A | |

TABLE 11
Phage Library 2

| Wild-Type | | | |
|---|---|---|---|
| Neu2 Amino | | Substituting | Codon |
| Acid(s) | Design | Amino Acids | Usage |
| 156-165 | Substitute with one of 12 | R, N, D, C, G, H, | NDT |
| TFAVGPGHCL | hydrophobic or polar | I, L, F, S, Y, V | |
| | amino acids | | |
| V176 | Substitute with one of 12 | R, N, D, C, G, H, | NDT |
| | hydrophobic or polar | I, L, F, S, Y, V | |
| | amino acids | | |
| P177 | Substitute with one of 12 | S, T, Y, L, F, A, | NHT |
| | hydrophobic or polar | P, V, I, N, D, H | |
| | amino acids | | |
| A178 | Substitute with one of 12 | S, T, Y, L, F, A, | NHT |
| | hydrophobic or polar | P, V, I, N, D, H | |
| | amino acids | | |
| A194 | Substitute with one of 12 | S, T, Y, L, F, A, | NHT |
| | hydrophobic or polar | P, V, I, N, D, H | |
| | amino acids | | |

TABLE 12
Phage Library 3

| Wild-Type | | | |
|---|---|---|---|
| Neu2 Amino | | Substituting | Codon |
| Acid(s) | Design | Amino Acids | Usage |
| F13 | Substitute with one of 9 polar | S, N, R, K, T, G, | RMV |
| | amino acids chain AAs | D, E, A | |
| L4 | Substitute with one of 12 | S, T, Y, L, F, A, | NHT |
| | hydrophobic or polar amino | P, V, I, N, D, H | |
| | acids | | |
| L7, V12 | Substitute with one of 6 polar | F, Y, S, I, T, N | WHT |
| | or aromatic amino acids | | |
| I22, A24 | Substitute with one of 9 polar | S, N, R, K, T, G, | RMV |
| | amino acids | D, E, A | |
| V325, L326, | Substitute with one of 6 polar | F, Y, S, I, T, N | WHT |
| and L327 | or aromatic amino acids | | |
| L365 | Substitute with one of 6 polar | F, Y, S, I, T, N | WHT |
| | or aromatic amino acids | | |
| P89 | Substitute with one of 5 non- | F, I, L, M, V | NTK |
| | polar amino acids | | |
| L34, A36, | Substitute with one of 12 | S, T, Y, L, F, A, | NHT |
| and V363 | hydrophobic or polar amino | P, V, I, N, D, H | |
| | acids | | |

[0299] The codon usage columns in TABLES 10-12 represent degenerate codon codes used in the design of the library, where the first, second, and third positions of a given codon encoding an amino acid are as shown in TABLE 13 and as described in Mena et al. (2005) PROTEIN ENG DES SEL. 18(12):559-61.

TABLE 13

| Degenerate Codon Code | Mixed bases |
|---|---|
| R | A, G |
| Y | C, T/U |
| M | A, C |
| K | G, T/U |
| S | G, C |
| W | A, T |
| H | A, C, T/U |
| B | G, C, T (or U) |
| V | A, C, G |
| D | A, G, T/U |
| N | A, C, G, T/U |

[0300] The phage display libraries were screened for binding to a conformation-specific antibody and/or a sialic acid biotinylated probe after heating to enrich for thermal stability and expression. The sialic acid biotinylated probe and its synthesis is depicted in FIG. 4. An exemplary phage display screening procedure is depicted in FIG. 5. Briefly, phage libraries expressing the desired Neu2 variants were generated. Phage were screened for binding to immobilized anti-Neu2 antibody and/or sialic acid biotinylated probe. Following washing to remove unbound phage, bound phage were eluted from the antibody or probe and analyzed as appropriate.

### C. Yeast Display

[0301] Neu2 was also expressed in a yeast display system allowing for screening of Neu2 variants for both expression level and resistance to heat denaturation. Neu2 with V6Y and I187K substitutions was used as a template for library preparation. Designed yeast display libraries 1a, 1b, 1c, 1d, 2a, 2b, 2c, 3a, 3b, and 3c are depicted in TABLEs 14-23, respectively. Each library included all of the possible combinations of the mutations depicted. Five additional sublibraries were generated by error prone PCR, at an approximate average rate of 1, 2, 3, 4, and 5 substitutions per enzyme.

TABLE 14
Yeast Library 1a

| Wild-Type Neu2 | | Codon |
|---|---|---|
| Amino Acid(s) | Substituting Amino Acids | Usage |
| L184 | All | NNK |
| H185 | All | NNK |
| P186 | None (Wild-type) | |
| K187 | None (Wild-type) | |
| Q188 | None (Wild-type) | |
| P190 | A, D, G, H, I, L, N, P, R, S, T, V | VNT |
| I191 | A, D, F, H, I, L, N, P, S, T, V, Y | NHT |
| C219 | None (Wild-type) | |
| G271 | All | NNK |
| C272 | All | NNK |

Total Diversity: 2.30E+07

TABLE 15
Yeast Library 1b

| Wild-Type Neu2 | | Codon |
|---|---|---|
| Amino Acid(s) | Substituting Amino Acids | Usage |
| L184 | A, D, F, H, I, L, N, P, S, T, V, Y | NHT |
| H185 | All | NNK |
| P186 | A, D, F, H, I, L, N, P, S, T, V, Y | NHT |
| K187 | None (Wild-type) | |
| Q188 | None (Wild-type) | |
| P190 | A, D, G, H, I, L, N, P, R, S, T, V | VNT |
| I191 | A, D, F, H, I, L, N, P, S, T, V, Y | NHT |
| C219 | None (Wild-type) | |
| G271 | A, D, E, G, K, N, R, S, T | RVM |
| C272 | A, C, D, G, H, N, P, R, S, T | NVT |

Total Diversity: 4.11E+07

TABLE 16
Yeast Library 1c

| Wild-Type Neu2 | | Codon |
|---|---|---|
| Amino Acid(s) | Substituting Amino Acids | Usage |
| L184 | A, D, F, H, I, L, N, P, S, T, V, Y | NHT |
| H185 | A, D, E, G, K, N, R, S, T | RVM |
| P186 | A, D, F, H, I, L, N, P, S, T, V, Y | NHT |
| K187 | A, D, E, G, K, N, R, S, T | RVM |
| Q188 | None (Wild-type) | |
| P190 | F, L, I, V | NTT |
| I191 | A, D, F, H, I, L, N, P, S, T, V, Y | NHT |
| C219 | None (Wild-type) | |
| G271 | A, D, E, G, K, N, R, S, T | RVM |
| C272 | A, D, F, H, L, P, S, V, Y | BHT |

Total Diversity: 4.53E+07

TABLE 17
Yeast Library 1d

| Wild-Type Neu2 | | Codon |
|---|---|---|
| Amino Acid(s) | Substituting Amino Acids | Usage |
| L184 | A, D, F, H, L, P, S, V, Y | BHT |
| H185 | A, D, E, G, K, N, R, S, T | RVM |
| P186 | A, D, F, H, L, P, S, V, Y | BHT |
| K187 | A, D, E, G, K, N, R, S, T | RVM |
| Q188 | A, D, F, H, L, P, S, V, Y | BHT |
| P190 | None (Wild-type) | |
| I191 | A, D, E, G, K, N, R, S, T | RVM |
| C219 | None (Wild-type) | |
| G271 | A, D, E, G, K, N, R, S, T | RVM |
| C272 | A, D, F, H, L, P, S, V, Y | BHT |

Total Diversity: 4.30E+07

TABLE 18
Yeast Library 2a

| Wild-Type Neu2 | | Codon |
|---|---|---|
| Amino Acid(s) | Substituting Amino Acids | Usage |
| T156 | R, N, D, C, G, H, I, L, F, S, Y, V | NDT |
| F157 | None (Wild-type) | |
| A158 | R, N, D, C, G, H, I, L, F, S, Y, V | NDT |
| V159 | None (Wild-type) | |
| G160 | R, N, D, C, G, H, I, L, F, S, Y, V | NDT |
| P161 | None (Wild-type) | |
| G162 | R, N, D, C, G, H, I, L, F, S, Y, V | NDT |
| H163 | None (Wild-type) | |
| C164 | R, N, D, C, G, H, I, L, F, S, Y, V | NDT |
| L165 | None (Wild-type) | |
| V176 | L, V, P, A, H, D | SHT |
| P177 | L, V, P, A, H, D | SHT |
| A178 | L, V, P, A, H, D | SHT |
| A194 | L, V, P, A, H, D | SHT |

Total Diversity: 3.22E+08

TABLE 19
Yeast Library 2b

| Wild-Type Neu2 | | Codon |
|---|---|---|
| Amino Acid(s) | Substituting Amino Acids | Usage |
| T156 | None (Wild-type) | |
| F157 | R, N, D, C, G, H, I, L, F, S, Y, V | NDT |
| A158 | None (Wild-type) | |
| V159 | R, N, D, C, G, H, I, L, F, S, Y, V | NDT |
| G160 | None (Wild-type) | |
| P161 | R, N, D, C, G, H, I, L, F, S, Y, V | NDT |
| G162 | None (Wild-type) | |
| H163 | R, N, D, C, G, H, I, L, F, S, Y, V | NDT |
| C164 | None (Wild-type) | |
| L165 | R, N, D, C, G, H, I, L, F, S, Y, V | NDT |
| V176 | L, V, P, A, H, D | SHT |
| P177 | L, V, P, A, H, D | SHT |
| A178 | L, V, P, A, H, D | SHT |
| A194 | L, V, P, A, H, D | SHT |

Total Diversity: 3.22E+08

TABLE 20
Yeast Library 2c

| Wild-Type Neu2 | | Codon |
|---|---|---|
| Amino Acid(s) | Substituting Amino Acids | Usage |
| T156 | A, D, G, H, N, P, R, S, T | WC |
| F157 | A, D, F, H, L, P, S, V, Y | BHT |
| A158 | A, D, G, H, N, P, R, S, T | WC |
| V159 | A, D, F, H, L, P, S, V, Y | BHT |
| G160 | A, D, G, H, N, P, R, S, T | WC |
| P161 | A, D, F, H, L, P, S, V, Y | BHT |
| G162 | A, D, G, H, N, P, R, S, T | WC |
| H163 | A, D, F, H, L, P, S, V, Y | BHT |
| C164 | A, D, G, H, N, P, R, S, T | WC |
| L165 | A, D, F, H, L, P, S, V, Y | BHT |
| V176 | None (Wild-type) | |
| P177 | None (Wild-type) | |
| A178 | None (Wild-type) | |
| A194 | None (Wild-type) | |

Total Diversity: 3.49E+09

TABLE 21
Yeast Library 3a

| Wild-Type Neu2 | | Codon |
|---|---|---|
| Amino Acid(s) | Substituting Amino Acids | Usage |
| L4 | S, T, Y, L, F, A, P, V, I, N, D, H | NHT |
| L7 | F, Y, S, I, T, N | WHT |
| V12 | None (Wild-type) | |
| F13 | None (Wild-type) | |
| I22 | S, N, R, K, T, G, D, E, A | RMV |
| A24 | S, N, R, K, T, G, D, E, A | RMV |
| L34 | None (Wild-type) | |
| A36 | None (Wild-type) | |
| H64 | F, Y, S, I, T, N | WHT |
| P89 | F, I, L, V | NTT |
| C164 | None (Wild-type) | |
| V325 | F, Y, S, I, T, N | WHT |
| L326 | F, Y, S, I, T, N | WHT |
| L327 | F, Y, S, I, T, N | WHT |
| C332 | None (Wild-type) | |
| V363 | S, T, Y, L, F, A, P, V, I, N, D, H | NHT |

Total Diversity: 3.63E+08

TABLE 22
Yeast Library 3b

| Wild-Type Neu2 | | Codon |
|---|---|---|
| Amino Acid(s) | Substituting Amino Acids | Usage |
| L4 | None (Wild-type) | |
| L7 | F, Y, S, I, T, N | WHT |
| V12 | S, T, Y, L, F, A, P, V, I, N, D, H | NHT |
| F13 | S, N, R, K, T, G, D, E, A | RMV |
| I22 | S, N, R, K, T, G, D, E, A | RMV |
| A24 | S, N, R, K, T, G, D, E, A | RMV |
| L34 | S, T, Y, L, F, A, P, V, I, N, D, H | NHT |
| A36 | S, T, Y, L, F, A, P, V, I, N, D, H | NHT |
| H64 | None (Wild-type) | |
| P89 | None (Wild-type) | |
| C164 | A, G, S, T | RST |
| V325 | None (Wild-type) | |
| L326 | None (Wild-type) | |
| L327 | None (Wild-type) | |
| C332 | A, D, G, H, N, P, R, S, T | VVC |
| V363 | None (Wild-type) | |

Total Diversity: 2.72E+08

TABLE 23
Yeast Library 3c

| Wild-Type Neu2 | | Codon |
|---|---|---|
| Amino Acid(s) | Substituting Amino Acids | Usage |
| L4 | None (Wild-type) | |
| L7 | None (Wild-type) | |
| V12 | None (Wild-type) | |
| F13 | None (Wild-type) | |
| I22 | S, T, Y, L, F, A, P, V, I, N, D, H | NHT |
| A24 | S, T, Y, L, F, A, P, V, I, N, D, H | NHT |
| L34 | None (Wild-type) | |
| A36 | None (Wild-type) | |
| H64 | F, Y, S, I, T, N | WHT |
| P89 | S, T, Y, L, F, A, P, V, I, N, D, H | NHT |
| C164 | A, G, S,T | RST |
| V325 | A, D, F, H, L, P, S, V, Y | BHT |
| L326 | A, D, F, H, L, P, S, V, Y | BHT |
| L327 | A, D, F, H, L, P, S, V, Y | BHT |
| C332 | A, D, G, H, N, P, R, S, T | WC |
| V363 | None (Wild-type) | |

Total Diversity: 2.72E+08

[0302] The codon usage columns in TABLES 14-23 represent degenerate codon codes used in the design of the library, where the first, second, and third positions of a given codon encoding an amino acid are as shown herein above in TABLE 13 and as described in Mena et al. (2005) PROTEIN ENG DES SEL. 18(12):559-61.

[0303] The yeast display libraries were screened for binding to a conformation-specific antibody and/or a sialic acid biotinylated probe after heating to enrich for thermal stability and expression. An exemplary yeast display screening procedure is depicted in FIG. 6. Briefly, a plasmid library encoding for the desired Neu2 variants, and yeast cells expressing the desired Neu2 variants on the surface, were generated. Yeast cells were heat shocked and then screened for binding to anti-Neu2 antibody and/or sialic acid biotinylated probe on magnetic beads. The magnetic beads were isolated to remove unbound cells, and bound cells were further analyzed for Neu2 affinity, activity, and stability as appropriate.

### D. Results

[0304] Mutant sialidases including mutations identified using the rational design, phage display, and yeast display approaches described in this Example were expressed as secreted proteins with a C-terminal human Fc tag in Expi293F cells using the pCEP4 mammalian expression vector. Expression was assayed using a ForteBio Octet with anti-human Fc sensors and Western blot and enzymatic activity was assayed using the fluorogenic substrate 4MU-NeuAc as described above.

[0305] Expression and activity levels for the mutant sialidases are shown in TABLE 24. In TABLE 24, enzymatic activity is indicated as “+++,” which denotes activity >2 fold higher than wild-type Neu2, “++,” which denotes activity comparable to wild-type Neu2, “+,” which denotes activity lower than wild-type Neu2, or “−,” which denotes no detectable activity, and expression is indicated as “++++,” which denotes expression >15 fold higher than wildtype-Neu2, “+++,” which denotes expression >6 fold higher than wild-type Neu2, “++,” which denotes expression 2-5 fold higher than wild-type Neu2, “+,” which denotes expression comparable to wild-type Neu2, or “−,” which denotes no detectable expression.

TABLE 24

| Identifier | Mutation(s) | Activity | Expression |
|---|---|---|---|
| Neu2-M104 | M1D, V6Y, P62G, I187K, C332A | + | ++++ |
| Neu2-M105 | M1D, V6Y, K9D, I187K, C332A, | + | +++ |
| | V363R, L365I | | |
| Neu2-M106 | M1D, V6Y, P62G, A93E, I187K, | ++ | ++++ |
| | C332A | | |
| Neu2-M107 | M1D, V6Y, K9D, I187K, C332A, | + | ++++ |
| | V363R, L365K | | |
| Neu2-M108 | M1D, V6Y, K9D, I187K, C332A, | + | ++++ |
| | V363R, L365S | | |
| Neu2-M109 | M1D, V6Y, K9D, I187K, C332A, | + | ++++ |
| | V363R, L365Q | | |
| Neu2-M110 | M1D, V6Y, K9D, I187K, C332A, | + | +++ |
| | V363R, L365H | | |
| Neu2-M111 | M1D, V6Y, A93K, I187K, C332A | ++ | ++ |
| Neu2-M112 | M1D, V6Y, A93E, I187K, C332A | ++ | ++ |
| Neu2-M113 | V6Y, I22N, C125Y, I187K, S301C, | − | +++ |
| | E319D | | |
| Neu2-M114 | V6Y, P62T, C125F, I187K, A222D | − | +++ |
| Neu2-M115 | V6Y, I187K, W292R | + | +++ |
| Neu2-M116 | V6Y, G107D, I187K | + | +++ |
| Neu2-M117 | C125L | + | + |
| Neu2-M118 | V6Y, C125L | + | ++ |
| Neu2-M119 | C125L, I187K | ++ | ++ |
| Neu2-M120 | V6Y, C125L, I187K | + | +++ |
| Neu2-M121 | M1D, V6Y, K45A, I187K, C332A | ++ | ++ |
| Neu2-M122 | M1D, V6Y, Q270A, I187K, C332A | ++ | +++ |
| Neu2-M123 | M1D, V6Y, K44R, K45R, I187K, | + | ++ |
| | C332A | | |
| Neu2-M124 | M1D, V6Y, Q112R, I187K, C332A | + | ++ |
| Neu2-M125 | M1D, V6Y, Q270F, I187K, C332A | + | ++ |
| Neu2-M126 | M1D, V6Y, I187K, S301R, W302K, | ++ | +++ |
| | C332A | | |
| Neu2-M127 | M1D, V6Y, K44E, K45E, I187K, | ++ | + |
| | C332A | | |
| Neu2-M128 | M1D, V6Y, I187K, L217V, C332A | + | ++ |
| Neu2-M129 | M1D, V6Y, I187K, L217A, C332A | + | ++ |
| Neu2-M130 | M1D, V6Y, I187K, C332A, Y359A | − | +++ |
| Neu2-M131 | M1D, V6Y, I187K, C332A, Y359S | − | +++ |
| Neu2-M132 | M1D, V6Y, K44E, K45E, I187K, | ++ | ++ |
| | S301R, W302K, C332A | | |
| Neu2-M133 | M1D, V6Y, Q112R, I187K, S301R, | ++ | +++ |
| | W302K, C332A | | |
| Neu2-M134 | M1D, V6Y, I187K, Q270A, S301R, | ++ | +++ |
| | W302K, C332A | | |
| Neu2-M135 | M1D, V6Y, K44E, K45E, Q112R, | + | + |
| | I187K, C332A | | |
| Neu2-M136 | M1D, V6Y, K44E, K45E, I187K, | ++ | ++ |
| | Q270A, C332A | | |
| Neu2-M137 | M1D, V6Y, K45A, I187K, Q270A, | ++ | +++ |
| | C332A | | |
| Neu2-M138 | M1D, V6Y, I187K, Q270H, C332A | ++ | +++ |
| Neu2-M139 | M1D, V6Y, I187K, Q270P, C332A | + | +++ |
| Neu2-M140 | M1D, V6Y, Q112K, I187K, C332A | ++ | ++ |
| Neu2-M141 | M1D, V6Y, P62S, I187K, Q270A, | + | +++ |
| | S301R, W302K, C332A | | |
| Neu2-M142 | M1D, V6Y, P62T, I187K, Q270A, | + | +++ |
| | S301R, W302K, C332A | | |
| Neu2-M143 | M1D, V6Y, P62N, I187K, Q270A, | + | +++ |
| | S301R, W302K, C332A | | |
| Neu2-M144 | V6Y, P62H, I187K | + | +++ |
| Neu2-M145 | V6Y, Q108H, I187K | + | ++ |
| Neu2-M146 | M1D, V6Y, P62H, I187K, C332A | ++ | +++ |
| Neu2-M147 | M1D, V6Y, P62G, I187K, C332A | ++ | ++ |
| Neu2-M148 | V6Y, P62G, I187K | + | ++ |
| Neu2-M149 | M1D, V6Y, P62H, I187K | ++ | ++ |
| Neu2-M150 | M1D, V6Y, Q108H, I187K | ++ | ++ |
| Neu2-M151 | M1D, V6Y, P62F, I187K, C332A | + | − |
| Neu2-M152 | M1D, V6Y, P62I, I187K, C332A | + | − |
| Neu2-M153 | M1D, V6Y, P62N, I187K, C332A | ++ | +++ |
| Neu2-M154 | M1D, V6Y, P62D, I187K, C332A | ++ | + |
| Neu2-M155 | M1D, V6Y, P62E, I187K, C332A | ++ | +++ |
| Neu2-M156 | V6Y, C164G, I187K, T249A | + | + |
| Neu2-M157 | V6Y, C164G, I187K | + | + |
| Neu2-M158 | V6Y, Q126L, I187K D251G | + | ++ |
| Neu2-M159 | V6Y, L54M, Q69H, R78K, A171G, | + | + |
| | I187K | | |
| Neu2-M160 | V6Y, P62T, I187K | + | ++ |
| Neu2-M161 | V6Y, Al 50V, I187K | + | ++ |
| Neu2-M162 | P5H, V6Y, P62S, I187K | + | ++ |
| Neu2-M163 | V6Y, C164G, I187K | + | + |

[0306] To confirm these results, Neu2-M106 (with amino acid sequence SEQ ID NO: 48, encoded by nucleotide sequence SEQ ID NO: 89) was expressed and purified with a protein A column. FIG. 7A is an image of an SDS-PAGE gel showing recombinant wildtype human Neu2 and Neu2 variant M106 (each with a C-terminal human Fc tag) under non-reducing and reducing conditions. FIG. 7B is an SEC-HPLC trace for recombinant wildtype human Neu2 and Neu2 variant M106 (each with a C-terminal human Fc tag). While Neu2-Fc had a yield of 0.3 mg/liter following protein-A purification, and monomer content of 7% as determined by SEC, Neu2-M106 had a yield of 20 mg/liter, and a monomer content of 85%.

[0307] The enzyme kinetics of Neu2-M106 were assayed by measuring the release of sialic acid from the fluorogenic substrate 4-methylumbelliferyl-N-acetylneuraminic acid (4MU-NeuAc) as described above. A fixed concentration of enzyme at 2 μg/well was incubated with fluorogenic substrate 4MU-NeuAc at concentrations ranging from 4 mM to 0.03 μM. FIG. 8 depicts the enzyme activity of Neu2 variant M106. Enzymatic activity of Neu2-M106 was comparable to wildtype Neu2, with a K_{M} determined to be 230 μM.

[0308] Together, these results show that the mutations identified by rational design, phage display, and/or yeast display approaches described herein can increase stability and/or expression of a sialidase.

### Example 3

[0309] This example describes the construction of recombinant human sialidases with mutations that increase expression and/or activity of the sialidase.

[0310] Unless indicated otherwise, mutant sialidases in this Example were expressed as secreted proteins with a C-terminal human Fc tag in Expi293F cells using the pCEP4 mammalian expression vector. Expression was assayed using a ForteBio Octet with anti-human Fc sensors and Western blot and enzymatic activity was assayed using the fluorogenic substrate 4MU-NeuAc as described above.

[0311] Mutant Neu2 sialidases were constructed including rationally designed substitutions at position Q126. Inspection of the Neu2 crystal structure revealed that mutation of Q126 may increase interactions with neighboring amino acid residues.

[0312] Additional mutant Neu2 sialidases were constructed including rationally designed substitution at position Q270. Inspection of the Neu2 crystal structure revealed that mutation of Q270 to certain amino acids may stabilize interactions with R237 and stabilize binding in the substrate pocket.

[0313] Additional mutant Neu2 sialidases were constructed including a substitution of an amino acid residue in a beta turn with a proline (for example D80P, R189P, and/or H239P substitutions). Substitution with a proline at these positions may, for example, stabilize the protein by influencing local protein folding.

[0314] Expression and activity levels for the resulting mutant sialidases are shown in TABLE 25. In TABLE 25, enzymatic activity is indicated as “++,” which denotes activity comparable to wild-type Neu2, “+,” which denotes activity lower than wild-type Neu2, or “−,” which denotes no detectable activity, and expression is indicated as “+++++”, which denotes expression >40 fold higher than wildtype-Neu2, “++++”, which denotes expression >15 fold higher than wildtype-Neu2, “+++,” which denotes expression >6 fold higher than wild-type Neu2, “++,” which denotes expression 2-5 fold higher than wild-type Neu2, “+,” which denotes expression comparable to wild-type Neu2, or “−,” which denotes no detectable expression.

TABLE 25

| Identifier | Mutation(s) | Activity | Expression |
|---|---|---|---|
| Neu2-M164 | M1D, V6Y, P62G, A93E, | ++ | ++++ |
| | Q126E, I187K, C332A | | |
| Neu2-M165 | M1D, V6Y, P62G, A93E, | ++ | ++++ |
| | Q126I, I187K, C332A | | |
| Neu2-M166 | M1D, V6Y, P62G, A93E, | + | +++++ |
| | Q126L, I187K, C332A | | |
| Neu2-M167 | M1D, V6Y, P62G, A93E, | + | +++++ |
| | Q126Y, I187K, C332A | | |
| Neu2-M168 | M1D, V6Y, P62G, A93E, | + | +++++ |
| | Q126F, I187K, C332A | | |
| Neu2-M169 | M1D, V6Y, P62G, A93E, | ++ | ++++ |
| | Q126H, I187K, C332A | | |
| Neu2-M170 | M1D, V6Y, P62G, A93E, | ++ | ++++ |
| | I187K, Q270S, C332A | | |
| Neu2-M171 | M1D, V6Y, P62G, A93E, | ++ | ++++ |
| | I187K, Q270T, C332A | | |
| Neu2-M172 | M1D, V6Y, P62G, A93E, | ++ | +++++ |
| | Q126Y, I187K, Q270T, | | |
| | C332A | | |
| Neu2-M173 | M1D, V6Y, P62G, A93E, | ++ | +++++ |
| | Q126Y, I187K, A242F, | | |
| | Q270T, C332A | | |
| Neu2-M174 | M1D, V6Y, P62G, D80P, | ++ | ++++ |
| | A93E, I187K, C332A | | |
| Neu2-M175 | M1D, V6Y, P62G, A93E, | ++ | +++ |
| | R170P, I187K, C332A | | |
| Neu2-M176 | M1D, V6Y, P62G, A93E, | ++ | ++++ |
| | I187K, Q188P, C332A | | |
| Neu2-M177 | M1D, V6Y, P62G, A93E, | ++ | ++++ |
| | I187K, R189P, C332A | | |
| Neu2-M178 | M1D, V6Y, P62G, A93E, | + | ++++ |
| | I187K, E225P, C332A | | |
| Neu2-M179 | M1D, V6Y, P62G, A93E, | ++ | ++++ |
| | I187K, H239P, C332A | | |
| Neu2-M180 | M1D, V6Y, P62G, A93E, | ++ | +++ |
| | I187K, E257P, C332A | | |

[0315] To confirm these results, Neu2-M173 (with amino acid sequence SEQ ID NO: 117, encoded by nucleotide sequence SEQ ID NO: 137) was expressed with a C-terminal human Fc tag and purified with a protein A and a ceramic hydroxyapatite (CHT) column. FIG. 9A is an image of an SDS-PAGE gel showing Neu2-M173-Fc (with a C-terminal human Fc tag) under non-reducing and reducing conditions. FIG. 9B is an SEC-HPLC trace for Neu2-M173-Fc (with a C-terminal human Fc tag). Neu2-M173-Fc had a yield of 120 mg/liter, and a monomer content of 90%.

[0316] The enzyme kinetics of Neu2-M173-Fc were assayed by measuring the release of sialic acid from the fluorogenic substrate 4-methylumbelliferyl-N-acetylneuraminic acid (4MU-NeuAc) as described above. A fixed concentration of enzyme at 2 μg/well was incubated with fluorogenic substrate 4MU-NeuAc at concentrations ranging from 4 mM to 0.03 μM. FIG. 10 depicts the enzyme activity of Neu2-M173-Fc. Enzymatic activity of Neu2-M173-Fc was comparable to wildtype Neu2, with a K_{M} determined to be 230 μM.

[0317] Additional mutant Neu2 sialidases were constructed including rationally designed substitutions at positions S301 and/or W302. Mutations of S301 and/or W302 may influence interactions with neighboring amino acid residues and/or substrate.

[0318] Expression and activity levels for the mutant sialidases are shown in TABLE 26. In TABLE 26, enzymatic activity is indicated as “++,” which denotes activity comparable to wild-type Neu2, “+,” which denotes activity lower than wild-type Neu2, or “−,” which denotes no detectable activity, and expression is indicated as “+++++”, which denotes expression >40 fold higher than wildtype-Neu2, “++++”, which denotes expression >15 fold higher than wildtype-Neu2, “+++,” which denotes expression >6 fold higher than wild-type Neu2, “++,” which denotes expression 2-5 fold higher than wild-type Neu2, “+,” which denotes expression comparable to wild-type Neu2, or “−,” which denotes no detectable expression.

TABLE 26

| Identifier | Mutation(s) | Activity | Expression |
|---|---|---|---|
| Neu2-M182 | M1D, V6Y, P62G, A93E, I187K, | ++ | ++++ |
| | S301A, C332A | | |
| Neu2-M183 | M1D, V6Y, P62G, A93E, I187K, | ++ | ++++ |
| | S301D, C332A | | |
| Neu2-M184 | M1D, V6Y, P62G, A93E, I187K, | ++ | +++ |
| | S301E, C332A | | |
| Neu2-M185 | M1D, V6Y, P62G, A93E, I187K, | + | ++++ |
| | S301F, C332A | | |
| Neu2-M186 | M1D, V6Y, P62G, A93E, I187K, | + | ++++ |
| | S301H, C332A | | |
| Neu2-M187 | M1D, V6Y, P62G, A93E, I187K, | ++ | +++++ |
| | S301K, C332A | | |
| Neu2-M188 | M1D, V6Y, P62G, A93E, I187K, | ++ | ++++ |
| | S301L, C332A | | |
| Neu2-M189 | M1D, V6Y, P62G, A93E, I187K, | ++ | ++++ |
| | S301M, C332A | | |
| Neu2-M190 | M1D, V6Y, P62G, A93E, I187K, | ++ | ++++ |
| | S301N, C332A | | |
| Neu2-M191 | M1D, V6Y, P62G, A93E, I187K, | ++ | ++++ |
| | S301P, C332A | | |
| Neu2-M192 | M1D, V6Y, P62G, A93E, I187K, | ++ | +++ |
| | S301Q, C332A | | |
| Neu2-M193 | M1D, V6Y, P62G, A93E, I187K, | ++ | +++++ |
| | S301R, C332A | | |
| Neu2-M194 | M1D, V6Y, P62G, A93E, I187K, | ++ | ++++ |
| | S301T, C332A | | |
| Neu2-M195 | M1D, V6Y, P62G, A93E, I187K, | ++ | ++++ |
| | S301V, C332A | | |
| Neu2-M196 | M1D, V6Y, P62G, A93E, I187K, | + | ++++ |
| | S301W, C332A | | |
| Neu2-M197 | M1D, V6Y, P62G, A93E, I187K, | ++ | ++++ |
| | S301Y, C332A | | |
| Neu2-M198 | M1D, V6Y, P62G, A93E, I187K, | + | ++++ |
| | W302A, C332A | | |
| Neu2-M199 | M1D, V6Y, P62G, A93E, I187K, | +++ | +++ |
| | W302D, C332A | | |
| Neu2-M200 | M1D, V6Y, P62G, A93E, I187K, | + | ++++ |
| | W302F, C332A | | |
| Neu2-M201 | M1D, V6Y, P62G, A93E, I187K, | ++ | ++++ |
| | W302G, C332A | | |
| Neu2-M202 | M1D, V6Y, P62G, A93E, I187K, | + | ++++ |
| | W302H, C332A | | |
| Neu2-M203 | M1D, V6Y, P62G, A93E, I187K, | + | ++++ |
| | W302I, C332A | | |
| Neu2-M204 | M1D, V6Y, P62G, A93E, I187K, | ++ | ++++ |
| | W302L, C332A | | |
| Neu2-M205 | M1D, V6Y, P62G, A93E, I187K, | + | ++ |
| | W302M, C332A | | |
| Neu2-M206 | M1D, V6Y, P62G, A93E, I187K, | + | ++++ |
| | W302N, C332A | | |
| Neu2-M207 | M1D, V6Y, P62G, A93E, I187K, | − | ++++ |
| | W302P, C332A | | |
| Neu2-M208 | M1D, V6Y, P62G, A93E, I187K, | ++ | ++++ |
| | W302Q, C332A | | |
| Neu2-M209 | M1D, V6Y, P62G, A93E, I187K, | ++ | +++++ |
| | W302R, C332A | | |
| Neu2-M210 | M1D, V6Y, P62G, A93E, I187K, | ++ | ++++ |
| | W302S, C332A | | |
| Neu2-M211 | M1D, V6Y, P62G, A93E, I187K, | ++ | ++++ |
| | W302T, C332A | | |
| Neu2-M212 | M1D, V6Y, P62G, A93E, I187K, | + | ++++ |
| | W302V, C332A | | |
| Neu2-M213 | M1D, V6Y, P62G, A93E, I187K, | + | ++++ |
| | W302Y, C332A | | |
| Neu2-M214 | M1D, V6Y, P62G, A93E, I187K, | ++ | ++++ |
| | S301A, W302A, C332A | | |
| Neu2-M215 | M1D, V6Y, P62G, A93E, I187K, | + | ++++ |
| | S301A, W302R, C332A | | |
| Neu2-M216 | M1D, V6Y, P62G, A93E, I187K, | ++ | ++++ |
| | S301A, W302S, C332A | | |
| Neu2-M217 | M1D, V6Y, P62G, A93E, I187K, | ++ | ++++ |
| | S301A, W302T, C332A | | |
| Neu2-M218 | M1D, V6Y, P62G, A93E, I187K, | + | ++++ |
| | S301K, W302S, C332A | | |
| Neu2-M219 | M1D, V6Y, P62G, A93E, I187K, | ++ | +++++ |
| | S301K, W302R, C332A | | |
| Neu2-M219 | M1D, V6Y, P62G, A93E, I187K, | ++ | ++++ |
| | S301K, W302T, C332A | | |
| Neu2-M220 | M1D, V6Y, P62G, A93E, I187K, | + | ++++ |
| | S301N, W302S, C332A | | |
| Neu2-M221 | M1D, V6Y, P62G, A93E, I187K, | ++ | ++++ |
| | S301N, W302T, C332A | | |
| Neu2-M222 | M1D, V6Y, P62G, A93E, I187K, | + | ++++ |
| | S301T, W302R, C332A | | |

### Example 4

[0319] This example describes the construction of recombinant human sialidases with mutations that reduce proteolytic cleavage.

[0320] Neu2-M106 (as described in Example 2, and with amino acid sequence SEQ ID NO: 48) was expressed as an Fc-fused single chain protein using a CHO cell expression system in a large scale (10 L) high cell density production and purified with a protein A column. The resulting protein was analyzed by SDS-PAGE. Results are shown in FIG. 11. Under reducing conditions, the protein included a mixture of full length (70 kDa, approx. 50%) and cleaved (40 kDa and 30 kDa, approx. 50%) fractions. However, in non-reducing conditions, there was no cleavage and the protein remained as a single chain (FIG. 11). Additionally, when Neu2-M106 was expressed on a smaller scale (with a shorter duration of cell culture and lower cell density) there was no cleavage and the protein remained as a single chain. A preliminary mass spectrometry analysis showed that the 40 kDa and 30 kDa molecular weight fractions observed under reducing conditions following large scale production are a result of cleavage between amino acid residues R243 and V244 of the sialidase. The enzymatic activity of cleaved Neu2-M106 was similar to that of uncleaved Neu2-M106.

[0321] It was hypothesized that the cleavage of Neu2-M106 could be due to the activity of intracellular proteases released as a result of cell lysis during protein production, harvesting, and/or purification. To test this hypothesis, cleaved Neu2-M106 (prepared using the large scale-production described above that results in cleavage) and uncleaved Neu2-M106 (prepared using the smaller scale production described above that does not result in cleavage) were both incubated with trypsin and analyzed by SDS-PAGE under reducing conditions (FIG. 12). Briefly, trypsin digestion reactions were performed by incubation of trypsin (5 μL, 0.005% solution in PBS) with Neu2-M106 (25 μL, 0.25 mg/mL in PBS pH 8.0) for 5 minutes on ice. Reactions were stopped by addition of LDS gel loading buffer (5 μL) and run on a reducing SDS-PAGE gel to observe trypsin mediated cleavage. The SDS-PAGE analysis showed that incubation of the uncleaved Neu2-M106 with trypsin resulted in the same cleavage pattern as that of the cleaved Neu2-M106. Additionally, incubation of the cleaved Neu2-M106 with trypsin resulted in increased intensity of the bands corresponding to the cleavage products.

[0322] Neu2-M106 was also incubated with trypsin in the presence of various protease inhibitors. Briefly, trypsin digestion reactions were performed by incubation of trypsin (0.005%) with Neu2-M106 (0.5 mg/mL) and protease inhibitor for 5 minutes on ice. Reactions were stopped by addition of LDS gel loading buffer and run on a reducing SDS-PAGE gel to observe trypsin mediated cleavage. Inhibitors used included iron citrate (at 0.3 and 5 mM), aprotinin (at 5,000 and 20,000 U/mL), AEBSF (at 0.1 and 1 mM), leupeptin (at 1 and 10 μM) or E-64 (at 1 and 10 μM). As seen in FIG. 13, protease inhibitors reduced the extent of trypsin cleavage.

[0323] Together, these results confirm that cleavage of Neu2-M106 following large-scale production is due to trypsin or a member of a similar class of proteases.

[0324] We next attempted to rationally design recombinant human sialidases with mutations that increase resistance to trypsin cleavage.

[0325] Unless indicated otherwise, in the remainder of this Example mutant sialidases were expressed as secreted proteins with a C-terminal human Fc tag in Expi293F cells (on a 50 mL scale) using the pCEP4 mammalian expression vector. The resulting protein was purified using a Protein A column. Expression was assayed using a ForteBio Octet with anti-human Fc sensors and Western blot and enzymatic activity was assayed using the fluorogenic substrate 4MU-NeuAc as described above. Protease cleavage was assayed by SDS-PAGE as described above.

[0326] First, R243 was mutated to different polar/charged amino acids such as K, E, H, N and Q. However, these mutations of R243 resulted in complete loss of activity and reduction in expression yields (R243 is also a conserved amino acid among similar sialidases).

[0327] Next, various amino residues surrounding the cleavage site were mutated and tested for expression, activity and trypsin cleavage resistance. Substitutions and combinations of substitutions that were tested are shown in FIG. 14. All mutations were tested in a Neu2-M106 background (i.e., including M1D, V6Y, P62G, A93E, I187K, and C332A substitutions).

[0328] Most of the mutant sialidases depicted in FIG. 14 expressed well, however only two of the mutant sialidases (including V244I or A242C mutations) were active. The A242C mutation resulted in greater than 10 fold improved trypsin resistance and slightly lower activity (both relative to Neu2-M106). However, having an unpaired cysteine could be a potential liability, so, A242 was mutated to all 19 other amino acids and assayed for activity and trypsin resistance. As shown in FIG. 15, mutation of A242 to aromatic amino acids such as F, W and Y resulted in a dramatic improvement in trypsin cleavage resistance compared to Neu2-M106 (FIG. 15A) and similar enzymatic activity to Neu2-M106 (FIG. 15B). SEC analysis showed that proteins containing each of these mutations had a similar pattern to that of Neu2-M106 and more than 95% monomer content (FIG. 15C).

[0329] Structural analysis showed that replacing A242 with an aromatic amino acid could provide additional hydrophobic or stacking interactions to L260 and V265 (nonpolar amino acids located in the vicinity of the A242). Therefore, L260 and V265 were also mutated to phenylalanine. Along with these mutations several other rationally designed mutants, which could provide extra stability, for example by increasing stacking interactions, were also tested for expression, activity, and protease resistance.

[0330] Select results are shown in FIG. 16. As shown in FIG. 16, the combination of R241Y and A242F mutations (Neu2-M255) resulted in the most resistance to trypsin cleavage (a greater than 10 fold improved trypsin resistance relative to Neu2-M106).

[0331] Expression, activity, and protease resistance levels for the mutant sialidases are shown in TABLE 27. In TABLE 27, enzymatic activity is indicated as “++,” which denotes activity comparable to wild-type Neu2, “+,” which denotes activity lower than wild-type Neu2, or “−,” which denotes no detectable activity, and expression is indicated as “+++++”, which denotes expression >40 fold higher than wildtype-Neu2, “++++”, which denotes expression >15 fold higher than wildtype-Neu2, “+++,” which denotes expression >6 fold higher than wild-type Neu2, “++,” which denotes expression 2-5 fold higher than wild-type Neu2, “+,” which denotes expression comparable to wild-type Neu2, or “−,” which denotes no detectable expression. Protease/trypsin resistance is indicated as “+++,” which denotes resistance >10 fold higher than Neu2-M106; “++,” which denotes resistance ≥5 fold higher than Neu2-M106, “+,” denotes resistance comparable to Neu2-M106, or “−,” which denotes resistance lower than Neu2-M106. NT=not tested.

TABLE 27

| | | | | Protease |
|---|---|---|---|---|
| Identifier | Mutation(s) | Activity | Expression | resistance |
| Neu2-M223 | M1D, V6Y, P62G, A93E, | ++ | +++++ | + |
| | I187K, L240Y, C332A | | | |
| Neu2-M224 | M1D, V6Y, P62G, A93E, | + | +++ | +++ |
| | I187K, A242C, C332A | | | |
| Neu2-M225 | M1D, V6Y, P62G, A93E, | − | ++++ | − |
| | I187K, A242D, C332A | | | |
| Neu2-M226 | M1D, V6Y, P62G, A93E, | − | +++ | − |
| | I187K, A242E, C332A | | | |
| Neu2-M227 | M1D, V6Y, P62G, A93E, | ++ | ++++ | ++ |
| | I187K, A242F, C332A | | | |
| Neu2-M228 | M1D, V6Y, P62G, A93E, | + | +++ | + |
| | I187K, A242G, C332A | | | |
| Neu2-M229 | M1D, V6Y, P62G, A93E, | + | +++ | + |
| | I187K, A242H, C332A | | | |
| Neu2-M230 | M1D, V6Y, P62G, A93E, | + | +++ | + |
| | I187K, A242I, C332A | | | |
| Neu2-M231 | M1D, V6Y, P62G, A93E, | + | ++++ | − |
| | I187K, A242K, C332A | | | |
| Neu2-M232 | M1D, V6Y, P62G, A93E, | + | +++ | + |
| | I187K, A242L, C332A | | | |
| Neu2-M233 | M1D, V6Y, P62G, A93E, | + | +++ | + |
| | I187K, A242M, C332A | | | |
| Neu2-M234 | M1D, V6Y, P62G, A93E, | + | ++++ | ++ |
| | I187K, A242N, C332A | | | |
| Neu2-M235 | M1D, V6Y, P62G, A93E, | + | +++ | ++ |
| | I187K, A242Q, C332A | | | |
| Neu2-M236 | M1D, V6Y, P62G, A93E, | + | ++++ | − |
| | I187K, A242R, C332A | | | |
| Neu2-M237 | M1D, V6Y, P62G, A93E, | + | +++ | − |
| | I187K, A242S, C332A | | | |
| Neu2-M238 | M1D, V6Y, P62G, A93E, | − | +++ | + |
| | I187K, A242T, C332A | | | |
| Neu2-M239 | M1D, V6Y, P62G, A93E, | + | +++ | + |
| | I187K, A242V, C332A | | | |
| Neu2-M240 | M1D, V6Y, P62G, A93E, | ++ | ++++ | ++ |
| | I187K, A242W, C332A | | | |
| Neu2-M241 | M1D, V6Y, P62G, A93E, | ++ | ++++ | ++ |
| | I187K, A242Y, C332A | | | |
| Neu2-M242 | M1D, V6Y, P62G, A93E, | ++ | ++++ | ++ |
| | I187K, A242F, L260F, | | | |
| | C332A | | | |
| Neu2-M243 | M1D, V6Y, P62G, A93E, | + | ++++ | ++ |
| | I187K, A242F, V265F, | | | |
| | C332A | | | |
| Neu2-M244 | M1D, V6Y, P62G, A93E, | + | ++++ | ++ |
| | I187K, A242F, A213C, | | | |
| | C332A | | | |
| Neu2-M245 | M1D, V6Y, P62G, A93E, | + | ++++ | ++ |
| | I187K, A242F, A213S, | | | |
| | C332A | | | |
| Neu2-M246 | M1D, V6Y, P62G, A93E, | ++ | ++++ | ++ |
| | I187K, A242F, A213T, | | | |
| | C332A | | | |
| Neu2-M247 | M1D, V6Y, P62G, A93E, | + | ++ | NT |
| | I187K, A242F, A213N, | | | |
| | C332A | | | |
| Neu2-M248 | M1D, V6Y, P62G, A93E, | ++ | ++++ | ++ |
| | I187K, A242F, A213C, | | | |
| | S258C, C332A | | | |
| Neu2-M249 | M1D, V6Y, P62G, A93E, | ++ | +++++ | + |
| | I187K, L240Y, L260F, | | | |
| | C332A | | | |
| Neu2-M250 | M1D, V6Y, P62G, A93E, | + | + | NT |
| | I187K, L240D, L260T, | | | |
| | C332A | | | |
| Neu2-M251 | M1D, V6Y, P62G, A93E, | + | ++ | NT |
| | I187K, L240N, L260D, | | | |
| | C332A | | | |
| Neu2-M252 | M1D, V6Y, P62G, A93E, | ++ | ++++ | + |
| | I187K, L240N, L260T, | | | |
| | C332A | | | |
| Neu2-M253 | M1D, V6Y, P62G, A93E, | ++ | ++++ | + |
| | I187K, L240N, L260Q, | | | |
| | C332A | | | |
| Neu2-M254 | M1D, V6Y, P62G, A93E, | ++ | +++ | ++ |
| | I187K, R241A, A242F, | | | |
| | C332A | | | |
| Neu2-M255 | M1D, V6Y, P62G, A93E, | ++ | +++ | +++ |
| | I187K, R241Y, A242F, | | | |
| | C332A | | | |
| Neu2-M256 | M1D, V6Y, P62G, A93E, | ++ | +++++ | ++ |
| | Q126Y, I187K, L240Y, | | | |
| | A242F, Q270T, C332A | | | |
| Neu2-M257 | M1D, V6Y, P62G, A93E, | ++ | ++++ | + |
| | I187K, V244I, C332A | | | |
| Neu2-M258 | M1D, V6Y, P62G, A93E, | + | +++ | ++ |
| | I187K, A242C, V244K, | | | |
| | C332A | | | |

### Example 5

[0332] This Example describes the construction and expression of antibody-sialidase genetic fusion proteins, and antibody sialidase conjugates (ASCs) containing the fusion proteins, with mutated human sialidases.

[0333] The architecture for four types of exemplary ASCs is depicted in FIG. 19. The first type of ASC, referred to as “Raptor,” includes an antibody (with two heavy chains and two light chains) with a sialidase fused at the C-terminus of each heavy chain of the antibody (FIG. 19A). The second type of ASC, referred to as “Janus,” contains one antibody arm (with one heavy chain and one light chain), and one sialidase-Fc fusion with a sialidase fused at the N-terminus of one arm of the Fc. Each Fc domain polypeptide in the Janus ASC contains either the “knob” (T366Y) or “hole” (Y407T) mutation for heterodimerization (residue numbers according to EU numbering, Kabat, E. A., et al. (1991) supra) (FIG. 19B). The third type of ASC, referred to as “Lobster,” contains two Fc domain polypeptides each with a sialidase fused at the N-terminus of the Fc and a scFv fused at the C-terminus of the Fc (FIG. 19C). The fourth type of ASC, referred to as “Bunk,” contains one antibody arm (with one heavy chain and one light chain) with an scFv fused at the C-terminus of one arm of the Fc and one sialidase-Fc fusion with a sialidase fused at the N-terminus of the other arm of the Fc. Each Fc domain polypeptide in the Bunk ASC contains either the “knob” (T366Y) or “hole” (Y407T) mutation for heterodimerization (residue numbers according to EU numbering, Kabat, E. A., et al. (1991) supra) (FIG. 19D).

[0334] Janus ASCs including Neu2 variants described in Example 2 and trastuzumab were made and tested for activity and expression. Expression was assayed using a ForteBio Octet with anti-human Fc sensors and Western blot and enzymatic activity was assayed using the fluorogenic substrate 4MU-NeuAc as described above. Expression and activity levels for the Janus ASCs are shown in TABLE 28. In TABLE 28, enzymatic activity is indicated as “+++,” which denotes activity >2 fold higher than wild-type Neu2, “++,” which denotes activity comparable to wild-type Neu2, “+,” which denotes activity lower than wild-type Neu2, or “−,” which denotes no detectable activity, and expression is indicated as “++++,” which denotes expression >15 fold higher than wildtype-Neu2, “+++,” which denotes expression >6 fold higher than wild-type Neu2, “++,” which denotes expression 2-5 fold higher than wild-type Neu2, “+,” which denotes expression comparable to wild-type Neu2, or “−,” which denotes no detectable expression.

TABLE 28

| Neu2 Variant | Mutation(s) | Activity | Expression |
|---|---|---|---|
| Neu2-M146 | M1D, V6Y, P62H, I187K, C332A | +++ | +++ |
| Neu2-M147 | M1D, V6Y, P62G, I187K, C332A | ++ | ++ |
| Neu2-M148 | V6Y, P62G, I187K | ++ | +++ |
| Neu2-M149 | M1D, V6Y, P62H, I187K | + | +++ |
| Neu2-M150 | M1D, V6Y, Q108H, I187K | ++ | ++ |
| Neu2-M151 | M1D, V6Y, P62F, I187K, C332A | ++ | +++ |
| Neu2-M152 | M1D, V6Y, P62I, I187K, C332A | ++ | +++ |
| Neu2-M153 | M1D, V6Y, P62N, I187K, C332A | ++ | +++ |
| Neu2-M154 | M1D, V6Y, P62D, I187K, C332A | ++ | ++ |
| Neu2-M155 | M1D, V6Y, P62E, I187K, C332A | ++ | + |
| Neu2-M156 | V6Y, C164G, I187K, T249A | + | + |
| Neu2-M157 | V6Y, C164G, I187K | + | + |
| Neu2-M158 | V6Y, Q126L, I187K D251G | ++ | ++ |
| Neu2-M159 | V6Y, L54M, Q69H, R78K, A171G, | + | + |
| | I187K | | |
| Neu2-M160 | V6Y, P62T, I187K | ++ | ++ |
| Neu2-M161 | V6Y, Al50V, I187K | + | ++ |
| Neu2-M162 | P5H, V6Y, P62S, I187K | ++ | ++ |
| Neu2-M163 | V6Y, C164G, I187K | + | + |

[0335] Additional Janus ASCs including Neu2 variants described in Example 2 and trastuzumab were made and tested for activity and expression. Janus ASCs were expressed in Expi293F cells in 500 mL cultures and purified using protein A and ion exchange chromatography. Expression was assayed using a ForteBio Octet with anti-human Fc sensors and Western blot and enzymatic activity was assayed using the fluorogenic substrate 4MU-NeuAc as described above. Expression and activity levels for the Janus ASCs are shown in TABLE 29. In TABLE 29, enzymatic activity is indicated as “+++,” which denotes activity >2 fold higher than wild-type Neu2, “++,” which denotes activity comparable to wild-type Neu2, “+,” which denotes activity lower than wild-type Neu2, or “−,” which denotes no detectable activity, and expression is indicated as “++++,” which denotes expression >15 fold higher than wildtype-Neu2, “+++,” which denotes expression >6 fold higher than wild-type Neu2, “++,” which denotes expression 2-5 fold higher than wild-type Neu2, “+,” which denotes expression comparable to wild-type Neu2, or “−,” which denotes no detectable expression.

TABLE 29

| Neu2 Variant | Mutation(s) | Activity | Expression |
|---|---|---|---|
| Neu2-M106 | M1D, V6Y, P62G, A93E, I187K, | ++ | ++++ |
| | C332A | | |
| Neu2-M134 | M1D, V6Y, I187K, Q270A, S301R, | +++ | ++++ |
| | W302K, C332A | | |
| Neu2-M141 | M1D, V6Y, P62S, I187K, Q270A, | ++ | ++++ |
| | S301R, W302K, C332A | | |
| Neu2-M142 | M1D, V6Y, P62T, I187K, Q270A, | ++ | ++++ |
| | S301R, W302K, C332A | | |
| Neu2-M143 | M1D, V6Y, P62N, I187K, Q270A, | ++ | ++++ |
| | S301R, W302K, C332A | | |
| Neu2-M153 | M1D, V6Y, P62N, I187K, C332A | ++ | ++++ |

### Example 6

[0336] This Example describes the construction and expression of antibody sialidase genetic fusion proteins, and antibody sialidase conjugates (ASCs) containing the fusion proteins, with mutated human sialidases.

[0337] A Janus Antibody Sialidase Conjugate (ASC) was made using Neu2 with M1D, V6Y, P62G, A93E, I187K and C332A substitutions and trastuzumab, referred to in this Example as “Janus Trastuzumab”. This Janus Trastuzumab (including a first polypeptide chain with amino acid sequence SEQ ID NO: 66, encoded by nucleotide sequence SEQ ID NO: 86, a second polypeptide chain with amino acid sequence SEQ ID NO: 67, encoded by nucleotide sequence SEQ ID NO: 87, and a third polypeptide chain with amino acid sequence SEQ ID NO: 68, encoded by nucleotide sequence SEQ ID NO: 88) was expressed and characterized for purity using SDS-PAGE and enzymatic activity using 4MU-NeuAc as described below.

[0338] Janus Trastuzumab was expressed in a 1 L transfection of Expi293 human cells using the pCEP4 mammalian expression vector. Janus Trastuzumab was purified using Protein A, followed by cation exchange chromatography (Hitrap SP-HP, GE Lifesciences). Purified proteins were analyzed by SDS-PAGE (FIG. 20), and SEC-HPLC (FIG. 21). Expression yield was 30 mg/L, with 90% monomer purity as determined by SEC-HPLC.

[0339] The enzymatic activity of the recombinantly expressed Janus Trastuzumab was assayed by measuring the release of sialic acid from the fluorogenic substrate 4-methylumbelliferyl-N-acetylneuraminic acid (4MU-NeuAc). Specifically, an enzyme kinetics assay was performed using a fixed concentration of enzyme at 2 μg/well, which was incubated with fluorogenic substrate 4MU-NeuAc at concentrations ranging from 4000 μM to 7.8 μM. As shown in FIG. 22, Janus Trastuzumab was enzymatically active, with a Km of 0.48 mM.

[0340] Janus Trastuzumab was tested for antigen (Her2) binding using ForteBio Octet with the ASC captured on anti-Fc sensors with dipping into serial dilutions of His-tagged Her2 (50 to 0.78 nM at 1:2 dilutions). Janus Trastuzumab bound to Her2 with comparable binding affinity to trastuzumab (FIG. 23).

[0341] An additional Janus ASC was made using Neu2 with M1D, V6Y, I187K and C332A substitutions and trastuzumab, referred to in this Example as “Janus Trastuzumab 2.” Janus Trastuzumab 2 includes a first polypeptide chain with amino acid sequence SEQ ID NO: 66, encoded by nucleotide sequence SEQ ID NO: 86, a second polypeptide chain with amino acid sequence SEQ ID NO: 67, encoded by nucleotide sequence SEQ ID NO: 87, and a third polypeptide chain with amino acid sequence SEQ ID NO: 141, encoded by nucleotide sequence SEQ ID NO: 142. In the third polypeptide chain of Janus Trastuzumab 2, the sialidase and the Fc domain are separated by a (G₄S)₂-based linker. Janus Trastuzumab 2 was expressed and characterized for purity using SDS-PAGE. Janus Trastuzumab 2 had an initial titer of 20 mg/L (30 to 55% heterodimer) and a yield of 5 to 10 mg/L with 80-93% purity following SEC-HPLC.

[0342] An additional Janus ASC was made using Neu2 with M1D, V6Y, P62G, A93E, Q126Y, I187K, Q270T, and C332A substitutions and trastuzumab, referred to in this Example as “Janus Trastuzumab 3.” Janus Trastuzumab 3 includes a first polypeptide chain with amino acid sequence SEQ ID NO: 66, encoded by nucleotide sequence SEQ ID NO: 86, a second polypeptide chain with amino acid sequence SEQ ID NO: 149, encoded by nucleotide sequence SEQ ID NO: 150, and a third polypeptide chain with amino acid sequence SEQ ID NO: 143, encoded by nucleotide sequence SEQ ID NO: 144. In the third polypeptide chain of Janus Trastuzumab 3, the sialidase and the Fc domain are separated by an IgG-based hinge region. Janus Trastuzumab 3 was expressed and characterized for purity using SDS-PAGE and enzymatic activity using 4MU-NeuAc as described above. Janus Trastuzumab 3 had an initial titer of 150 mg/L and a yield of 40 to 77 mg/L with 92% purity following SEC-HPLC. Janus Trastuzumab 3 had equivalent enzyme activity (0.52 mM KM, 1.96×10⁶ Vmax) to Janus Trastuzumab.

[0343] An additional Janus ASC was made using Neu2 with M1D, V6Y, P62G, A93E, Q126Y, I187K, A242F, Q270T and C332A substitutions and trastuzumab, referred to in this Example as “Janus Trastuzumab 4.” Janus Trastuzumab 4 includes a first polypeptide chain with amino acid sequence SEQ ID NO: 66, encoded by nucleotide sequence SEQ ID NO: 86, a second polypeptide chain with amino acid sequence SEQ ID NO: 149, encoded by nucleotide sequence SEQ ID NO: 150, and a third polypeptide chain with amino acid sequence SEQ ID NO: 145, encoded by nucleotide sequence SEQ ID NO: 146. In the third polypeptide chain of Janus Trastuzumab 4, the sialidase and the Fc domain are separated by an IgG-based hinge region. Janus Trastuzumab 4 was expressed and characterized for purity using SDS-PAGE and enzymatic activity using 4MU-NeuAc as described above. Janus Trastuzumab 4 had a yield of 132 mg/L with 87% purity following SEC-HPLC and comparable enzyme activity (0.45 mM KM, 1.6×10⁶ Vmax) to Janus Trastuzumab.

[0344] An additional Janus ASC was made using an enzymatically inactive Neu2 with M1D, V6Y, K9D, A93E, I187K, E218A, C219N, C332A, V363R, and L365R substitutions and trastuzumab, referred to in this Example as “Janus Trastuzumab LOF.” Janus Trastuzumab LOF includes a first polypeptide chain with amino acid sequence SEQ ID NO: 66, encoded by nucleotide sequence SEQ ID NO: 86, a second polypeptide chain with amino acid sequence SEQ ID NO: 67, encoded by nucleotide sequence SEQ ID NO: 87, and a third polypeptide chain with amino acid sequence SEQ ID NO: 147, encoded by nucleotide sequence SEQ ID NO: 148. In the third polypeptide chain of Janus Trastuzumab LOF, the sialidase and the Fc domain are separated by a (G₄S)₂-based linker. Janus Trastuzumab LOF was expressed and characterized for purity using SDS-PAGE and its lack of enzymatic activity using 4MU-NeuAc was confirmed.

[0345] Enzyme activity of Janus Trastuzumab and Janus Trastuzumab 2 was measured using 4MU-NeuAc as described above. Janus Trastuzumab and Janus Trastuzumab 2 had enzyme activities of 0.49 mM KM, 2.1×10⁶ Vmax and 0.15 mM KM, 1.8×10⁶ Vmax, respectively. Binding to HER2 positive SKBR3 cells was measured, with trastuzumab (without any conjugated sialidase) used as a control. Janus Trastuzumab, Janus Trastuzumab 2 and trastuzumab bound SKBR3 cells with EC50s of 1.0, 1.3 and 1.0 μg/ml, respectively. Desialylation of SKBR-3 cells was measured by an increase in PNA or Peanut agglutinin lectin staining. Janus Trastuzumab and Janus Trastuzumab 2 desialylated SKBR3 cells with EC50s of 0.5 and 0.8 μg/ml, respectively. As expected, there was no measurable desialylation observed for trastuzumab.

[0346] Stability of Janus Trastuzumab and Janus Trastuzumab 2 was measured by suspending the ASCs at 1 mg/mL in PCC buffer (PBS+25 mM Citrate+4 mM CaCl₂) and incubating at 37° C. for 7 days. Monomer content was monitored using SEC-HPLC. Janus Trastuzumab maintained a monomer percentage above 75% after 7 days at 37° C. Janus Trastuzumab 2's monomer percentage dropped from 80% to 33% due to aggregation by day 7. Enzyme activity was measured using 4MU-NeuAc as described above. Both ASCs maintained enzyme activity throughout the study.

[0347] Janus Trastuzumab was assayed for its impact on phagocytosis of tumor cells by M2-like macrophages. Briefly, 50,000 M2-like macrophages were seeded in a 24-well plate and supplied with low levels of M-CSF (10 ng/ml) and IL-4 (10 ng/ml). HT-29 or BT-20 tumor cells were labelled with CFSE dye and pre-treated with Janus Trastuzumab, Janus Trastuzumab LOF or trastuzumab (50 μg/ml) and incubated for 4 hours. The cells were washed after 4 hours and 250,000 tumor cells were added to the macrophage plate (a 1:5 macrophage to tumor cell ratio). The phagocytosis percentage was measured after 2 hours of incubation using flow cytometry with markers for CD11b, CD45 and CFSE+tumor cells. As depicted in FIG. 30, Janus Trastuzumab induced an approximately 3-fold increase in the phagocytosis of BT-20 tumor cells (FIG. 30A) or HT-29 tumor cells (FIG. 30B).

### Example 7

[0348] This Example describes the in vivo administration of antibody sialidase conjugates (ASCs) containing bacterial sialidases in a mouse syngeneic breast cancer model.

[0349] The following ASCs were made and tested in this Example: (i) a Janus ASC including Salmonella typhimurium sialidase (St-sialidase) and trastuzumab (including a first polypeptide chain with amino acid sequence SEQ ID NO: 66, encoded by nucleotide sequence SEQ ID NO: 86, a second polypeptide chain with amino acid sequence SEQ ID NO: 67, encoded by nucleotide sequence SEQ ID NO: 87, and a third polypeptide chain with amino acid sequence SEQ ID NO: 90, encoded by nucleotide sequence SEQ ID NO: 91); (ii) a Raptor ASC including St-sialidase and trastuzumab (including first and fourth polypeptide chains with amino acid sequence SEQ ID NO: 66, encoded by nucleotide sequence SEQ ID NO: 86, and second and third polypeptide chains with amino acid sequence SEQ ID NO: 92, encoded by nucleotide sequence SEQ ID NO: 93); and (iii) a Lobster ASC including St-sialidase and an scFv derived from trastuzumab (including first and second polypeptide chains with amino acid sequence SEQ ID NO: 94, encoded by nucleotide sequence SEQ ID NO: 95).

[0350] These ASCs were compared to trastuzumab in a mouse syngeneic tumor model injected with a murine breast cancer cell line expressing human Her2 (EMT6-hHer2 cells). Female BALB/c mice, 6-8 weeks of age, were inoculated subcutaneously in the right lower flank region with EMT6-Her2 tumor cells (5×10⁵) in 0.1 ml of PBS for tumor development. Mice were randomly allocated to 8 groups when tumors reached 50-100 mm³, mean ˜75-100 mm³. Treatment groups are described in TABLE 30 with dosing schedule indicated post randomization. Anti-mouse NK1.1 (Clone: PK136; BioXcell, 621717N1), anti-mouse CD8a (Clone: 53-6.7; BioXcell, BE0004-1) and liposomal clodronate (FormuMax Scientific, Inc.) were included in treatment groups as indicated.

TABLE 30

| | Animal | | Dose | Dose | | Schedule |
|---|---|---|---|---|---|---|
| Group | No. | Treatment | (mg/kg) | volume(μL/g) | Route | (Days) |
| 1 | 8 | Vehicle (PBS) | NA | 10 | i.p. | 0, 3, 7, 10, 14, 17 |
| 2 | 8 | Trastuzumab | 10 | 10 | i.p. | 0, 3, 7, 10, 14, 17 |
| 3 | 8 | Raptor | 10 | 10 | i.p. | 0, 3, 7, 10, 14, 17 |
| 4 | 8 | Janus | 10 | 10 | i.p. | 0, 3, 7, 10, 14, 17 |
| 5 | 8 | Lobster | 10 | 10 | i.p. | 0, 3, 7, 10, 14, 17 |
| 6 | 8 | Janus | 10 | 10 | i.p. | 0, 3, 7, 10, 14, 17 |
| | | anti-mouse NK 1.1 | 10 | 10 | i.p. | 0, 3, 7, 10, 14, 17 |
| | | (Clone: PK136) | | | | |
| 7 | 8 | Janus | 10 | 10 | i.p. | 0, 3, 7, 10, 14, 17 |
| | | anti-mouse CD8α | 10 | 10 | i.p. | 0, 3, 7, 10, 14, 17 |
| | | (Clone: 53-6.7) | | | | |
| 8 | 8 | Janus | 10 | 10 | i.p. | 0, 3, 7, 10, 14, 17 |
| | | liposomal clodronate | 0.5 | 100 | i.p. | TIW × 2 wks |
| | | | mg/mouse | μL/mouse | | |

[0351] The results from for treatment with trastuzumab, and Raptor, Janus and Lobster ASCs are shown in FIGS. 24A, 24B, 24C and 24D respectively. As can be seen, trastuzumab resulted in no complete responses in eight individual mice as treated (defined as regression below the limit of palpation at any point for the duration of the study, FIG. 24A). This is in contrast to Raptor, which demonstrated 2 out of 8 animals with a complete response (FIG. 24B), Janus which demonstrated 3 out of 8 animals with a complete response (FIG. 24C) and Lobster which demonstrated 2 out of 8 animals with a complete response (FIG. 24D).

[0352] The results of administration of Janus with NK depletion (anti-mouse NK1.1), macrophage depletion (liposomal clodronate) and CD8 T cell depletion (anti-mouse CD8a) are shown in FIG. 25. As can be seen, compared to Janus treatment alone (FIG. 24C), where there was a complete response in 3 out of 8 animals, NK depletion reduced the number of complete responses to 1 out of 8 animals (FIG. 25A). Macrophage depletion also reduced the number of complete responses to 1 out of 8 animals (FIG. 25B). CD8 T cell depletion completely reversed the effects of Janus, with no animals showing a complete response (FIG. 25C). FIG. 25D shows the mean tumor volume for vehicle, Janus alone, trastuzumab alone and Janus with NK, macrophage and CD8 T cell depletions. These results demonstrate that innate immunity (NK and macrophage dependent) as well as adaptive immunity (CD8 T cells) contribute to in vivo ASC activity.

### Example 8

[0353] This Example describes the in vivo administration of antibody sialidase conjugates (ASCs) with bacterial sialidases in a mouse syngeneic breast cancer model and the induction of long-term anti-tumor immune memory by an ASC.

[0354] The following ASCs were made and tested in this Example: (i) a Janus ASC including Salmonella typhimurium sialidase (St-sialidase) and trastuzumab (including a first polypeptide chain with amino acid sequence SEQ ID NO: 66, encoded by nucleotide sequence SEQ ID NO: 86, a second polypeptide chain with amino acid sequence SEQ ID NO: 67, encoded by nucleotide sequence SEQ ID NO: 87, and a third polypeptide chain with amino acid sequence SEQ ID NO: 90, encoded by nucleotide sequence SEQ ID NO: 91); and (ii) a Janus ASC including St-sialidase with two loss of function mutations, D100V and G231V, and trastuzumab (“Janus-LOF,” including a first polypeptide chain with amino acid sequence SEQ ID NO: 66, encoded by nucleotide sequence SEQ ID NO: 86, a second polypeptide chain with amino acid sequence SEQ ID NO: 67, encoded by nucleotide sequence SEQ ID NO: 87, and a third polypeptide chain with amino acid sequence SEQ ID NO: 96, encoded by nucleotide sequence SEQ ID NO: 97).

[0355] These ASCs were tested in a mouse syngeneic orthotopic tumor model injected with an independent EMT6 cell line expressing human Her2 (EMT6-hHer2 cells as described in D'Amico et al. (2016) ANNALS OF ONCOLOGY, Volume 27, Issue suppl_8, 41P. Female BALB/c mice, 6-8 weeks of age, were inoculated via intra mammary implantation with EMT6-Her2 tumor cells (5×10⁶). Mice were randomly allocated to 6 groups when tumors reached approximately 250 mm³. The treatment groups are described in TABLE 31 with dosing schedule indicated post randomization. Anti-mouse PD1 was obtained from BioXcell (RMP1-14, Cat. #665418F1).

TABLE 31

| | | | | Dose | | |
|---|---|---|---|---|---|---|
| | Animal | | Dose | volume | | Schedule |
| Group | No. | Treatment | (mg/kg) | (μL/g) | Route | (Days) |
| 1 | 6 | Vehicle (PBS) | NA | 10 | i.p. | 0, 3, 7, 10 |
| 2 | 6 | Trastuzumab | 10 | 10 | i.p. | 0, 3, 7, 10 |
| 3 | 6 | Janus | 10 | 10 | i.p. | 0, 3, 7, 10 |
| 4 | 6 | Janus Loss of | 10 | 10 | i.p. | 0, 3, 7, 10 |
| | | Function (LOF) | | | | |
| 5 | 6 | anti-mouse PD1 | 10 | 10 | i.p. | 0, 3, 7, 10 |
| 6 | 6 | Janus | 10 | 10 | i.p. | 0, 3, 7, 10 |
| | | anti-mouse PD1 | 10 | 10 | i.p. | 0, 3, 7, 10 |

[0356] The results for Groups 1 through 4 (vehicle, trastuzumab, Janus and Janus LOF) are shown in FIG. 26A. As can be seen, 3 out of 6 animals treated with Janus had a complete regression of tumor growth. Notably, Janus LOF and trastuzumab were both comparable to vehicle treated animals.

[0357] The 3 mice with a complete regression (“cured mice”) were rechallenged with either the same EMT6-Her2 cells used originally or parental EMT6 cells (lacking engineered human Her2 expression). EMT6 cells and EMT6-Her2 cells were inoculated subcutaneously in the right or left lower flank region respectively (5×10⁵) in 0.1 ml of PBS for tumor development of all three cured mice. EMT6-Her2 cells were also inoculated subcutaneously into naïve mice as a control. As can be seen in FIG. 26B, neither EMT6-Her2 cells nor parental EMT6 cells resulted in tumor growth in the cured mice while EMT6-Her2 cells developed into tumors as expected in the naïve mice. These results suggest that the antibody sialidase conjugates of the present invention are capable of inducing long term memory against tumors. In addition, the long term memory is towards the tumor cell and is independent of the originally targeted cancer antigen (Her2 in this case).

[0358] The results for Groups 1, 5 and 6 (vehicle, anti-mouse PD1 and anti-mouse PD1 combined with Janus) are shown in FIG. 27A and FIG. 27B. While anti-mouse PD1 had good activity with 4 out of 6 mice demonstrating complete regressions (similar to Janus alone with 3 out of 6 mice demonstrating complete regression, see FIG. 26A), the combination of anti-mouse PD1 with Janus demonstrated complete regression of tumor growth in all 6 mice (FIG. 27B). There was no body weight loss in any of the animals given this combination.

### Example 9

[0359] This Example describes the in vivo administration of antibody sialidase conjugates (ASCs) with bacterial sialidases in a mouse syngeneic melanoma model.

[0360] A Janus ASC including Salmonella typhimurium sialidase (St-sialidase) and trastuzumab (including a first polypeptide chain with amino acid sequence SEQ ID NO: 66, encoded by nucleotide sequence SEQ ID NO: 86, a second polypeptide chain with amino acid sequence SEQ ID NO: 67, encoded by nucleotide sequence SEQ ID NO: 87, and a third polypeptide chain with amino acid sequence SEQ ID NO: 90, encoded by nucleotide sequence SEQ ID NO: 91) was made and tested in this Example.

[0361] The ASC was tested in a mouse syngeneic tumor model injected with a B16 melanoma cell line expressing human Her2 (B16D5-Her2, Surana et al. CANCER IMMUNOL RES, 2(11): 1103-1112). Female C57BL/6 mice, 6-8 weeks of age, were inoculated subcutaneously in the right lower flank region with B16D5-Her2 tumor cells (5×10⁵). Mice were randomly allocated to 3 groups when tumors reached approximately 50 to 100 mm³. Treatment groups are described in TABLE 32 with dosing schedule indicated post randomization. Anti-mouse PD1, obtained from BioXcell (RMP1-14, Cat. No. 665418F1) and anti-mouse CTLA4, obtained from BioXcell (9D9, Cat. #BE0164), were used in combination.

TABLE 32

| | | | | Dose | | |
|---|---|---|---|---|---|---|
| | No. of | | Dose | volume | | Schedule |
| Group | Animal | Treatment | (mg/kg) | (μL/g) | Route | (Days) |
| 1 | 6 | Janus | NA | 10 | i.p. | 0, 3, 7, 10 |
| 2 | 6 | Trastuzumab | 10 | 10 | i.p. | 0, 3, 7, 10 |
| 3 | 6 | anti-mouse | 10 | 10 | i.p. | 0, 3, 7, 10 |
| | | CTLA4 | | | | |
| | | anti-mouse PD1 | 10 | 10 | i.p. | 0, 3, 7, 10 |

[0362] The B16 melanoma mouse model is considered a difficult tumor model to treat with immuno-oncology approaches. A comparison of Janus to a combination of anti-mouse PD1 and anti-mouse CTLA4 was carried out. The results are shown in FIG. 28. Anti-mouse PD1 combined with anti-mouse CTLA4 had an impact on B16D5-Her2 tumor growth, but this combination also demonstrated significant weight loss in the treated animals. By comparison, Janus demonstrated a more robust anti-tumor activity with no significant weight loss. Trastuzumab alone demonstrated marginal activity in this model.

### Example 10

[0363] This Example describes the in vivo administration of antibody sialidase conjugates (ASCs) containing human sialidases in a mouse syngeneic breast cancer model.

[0364] The following ASCs were made and tested in this Example: (i) Janus Trastuzumab, as described in Example 6, including Neu2 with M1D, V6Y, P62G, A93E, I187K and C332A substitutions and trastuzumab (including a first polypeptide chain with amino acid sequence SEQ ID NO: 66, encoded by nucleotide sequence SEQ ID NO: 86, a second polypeptide chain with amino acid sequence SEQ ID NO: 67, encoded by nucleotide sequence SEQ ID NO: 87, and a third polypeptide chain with amino acid sequence SEQ ID NO: 68, encoded by nucleotide sequence SEQ ID NO: 88); (ii) Janus Trastuzumab 2, as described in Example 6, including Neu2 with M1D, V6Y, I187K and C332A substitutions and trastuzumab (including a first polypeptide chain with amino acid sequence SEQ ID NO: 66, encoded by nucleotide sequence SEQ ID NO: 86, a second polypeptide chain with amino acid sequence SEQ ID NO: 67, encoded by nucleotide sequence SEQ ID NO: 87, and a third polypeptide chain with amino acid sequence SEQ ID NO: 141, encoded by nucleotide sequence SEQ ID NO: 142); and (iii) Janus Trastuzumab LOF, as described in Example 6, including Neu2 with M1D, V6Y, K9D, A93E, I187K, E218A, C219N, C332A, V363R, and L365R substitutions and trastuzumab (including a first polypeptide chain with amino acid sequence SEQ ID NO: 66, encoded by nucleotide sequence SEQ ID NO: 86, a second polypeptide chain with amino acid sequence SEQ ID NO: 67, encoded by nucleotide sequence SEQ ID NO: 87, and a third polypeptide chain with amino acid sequence SEQ ID NO: 147, encoded by nucleotide sequence SEQ ID NO: 148).

[0365] Janus Trastuzumab was compared to isotype control antibody in a mouse syngeneic tumor model injected with a murine breast cancer cell line stably expressing human HER2 (EMT6-HER2). Female BALB/c mice, 6-8 weeks of age, were inoculated subcutaneously in the right lower flank region with EMT6-HER2 tumor cells (5×10⁵) for tumor development. Mice were randomly allocated to groups of 8 animals each when tumors reached 50-100 mm³, mean˜75-100 mm³.

[0366] Mice were treated via intraperitoneal injection of 10 mg/kg and tumor volume (mm³) was recorded. FIG. 29 shows individual tumor growth for mice that received treatment with Janus Trastuzumab or control. Significant tumor growth delay was observed following treatment with Janus Trastuzumab in this experiment.

[0367] Janus Trastuzumab 2 was compared to trastuzumab or isotype control in a mouse syngeneic tumor model injected with a murine breast cancer cell line stably expressing human HER2 (EMT6-HER2). Female BALB/c mice, 6-8 weeks of age, were inoculated subcutaneously in the right lower flank region with EMT6-HER2 tumor cells (5×10⁵) for tumor development. Mice were randomly allocated to groups of 8 animals each when tumors reached 50-100 mm³, mean˜75-100 mm³.

[0368] Mice were treated via intraperitoneal injection of either 1.0 or 10 mg/kg for Janus Trastuzumab 2 or 10 mg/kg trastuzumab and tumor volume (mm³) was recorded. FIG. 31 shows tumor growth for individual mice that received treatment with isotype (FIG. 31A), trastuzumab (FIG. 31B), Janus Trastuzumab 2 at 1.0 mg/kg (FIG. 31C), or Janus Trastuzumab 2 at 10 mg/kg (FIG. 31D). Significant tumor growth delay was observed following treatment with Janus Trastuzumab 2 at 10 mg/kg (3 out of 8 mice with complete response, 1 partial response) and at 1 mg/kg (one complete response) in this experiment.

[0369] An additional study was run comparing Janus Trastuzumab to Janus Trastuzumab 2 in the EMT6-HER2 syngeneic model. Female BALB/c mice, 6-8 weeks of age, were inoculated subcutaneously in the right lower flank region with EMT6-HER2 tumor cells (5×10⁵) for tumor development. Mice were randomly allocated to groups of 8 animals each when tumors reached 50-100 mm³, mean˜75-100 mm³. Mice were treated via intraperitoneal injection of either Janus Trastuzumab, Janus Trastuzumab 2, or isotype control (all dosed at 10 mg/kg) and tumor volume (mm³) was recorded. FIG. 32 shows the efficacy of Janus Trastuzumab and Janus Trastuzumab 2 in this model.

[0370] An additional study was run comparing Janus Trastuzumab and Janus Trastuzumab LOF in the EMT6-HER2 syngeneic model. Female BALB/c mice, 6-8 weeks of age, were inoculated subcutaneously in the right lower flank region with EMT6-HER2 tumor cells (5×10⁵) for tumor development. Mice were randomly allocated to groups of 8 animals each when tumors reached 50-100 mm³, mean˜75-100 mm³. Mice were treated via intraperitoneal injection of either Janus Trastuzumab, Janus Trastuzumab LOF, or isotype control (all dosed at 10 mg/kg) and tumor volume (mm³) was recorded. FIG. 33 shows superior activity of Janus Trastuzumab (3 complete responses and 2 partial responses out of 8 animals, FIG. 33C) compared to Janus Trastuzumab LOF (FIG. 33B) or isotype control (FIG. 33A) in this model. These results demonstrate the important of sialidase enzyme activity for in vivo efficacy of the antibody sialidase conjugate.

### Example 11

[0371] This Example describes the in vivo administration of antibody sialidase conjugates (ASCs) containing human sialidases in a mouse syngeneic melanoma model.

[0372] Janus Trastuzumab 2, as described in Example 6, including Neu2 with M1D, V6Y, I187K and C332A substitutions and trastuzumab (including a first polypeptide chain with amino acid sequence SEQ ID NO: 66, encoded by nucleotide sequence SEQ ID NO: 86, a second polypeptide chain with amino acid sequence SEQ ID NO: 67, encoded by nucleotide sequence SEQ ID NO: 87, and a third polypeptide chain with amino acid sequence SEQ ID NO: 141, encoded by nucleotide sequence SEQ ID NO: 142) was made and tested in this Example.

[0373] Janus Trastuzumab 2 was tested in a mouse syngeneic tumor model injected with a B16 melanoma cell line expressing human Her2 as described in Example 9. The B16 melanoma mouse model is considered a difficult model to treat with immuno-oncology approaches. Female C57BL/6 mice, 6-8 weeks of age, were inoculated subcutaneously in the right lower flank region with B16D5-Her2 tumor cells (5×10⁵). Mice were randomly allocated to 6 groups of 8 mice when tumors reached approximately 50 to 100 mm³. Mice were treated with either: (i) Janus Trastuzumab 2, (ii) trastuzumab, (iii) an anti-mouse PD-1 antibody (anti-mPD1), (iv) a combination of Janus Trastuzumab 2 and anti-mPD1, (v) a combination of trastuzumab and anti-mPD1, or (vi) isotype control, all at 10 mg/kg for each agent. The results are shown in FIG. 34. Janus Trastuzumab 2 (FIG. 34D) demonstrated greater anti-tumor activity than trastuzumab (FIG. 25B) or isotype (FIG. 34A). The combination of Janus Trastuzumab 2 with anti-mPD1 (FIG. 34E) demonstrated robust activity in this model, with 4 out of 8 mice demonstrating a complete response. This combination was more active than anti-mPD1 alone (FIG. 34C) or anti-mPD1 in combination with trastuzumab (FIG. 34F).

### Example 12

[0374] This example describes in vivo administration and mechanistic evaluation of an antibody sialidase conjugate containing a human sialidase.

[0375] The following ASCs were made and tested in this Example: (i) Janus Trastuzumab 2, as described in Example 6, including Neu2 with M1D, V6Y, I187K and C332A substitutions and trastuzumab (including a first polypeptide chain with amino acid sequence SEQ ID NO: 66, encoded by nucleotide sequence SEQ ID NO: 86, a second polypeptide chain with amino acid sequence SEQ ID NO: 67, encoded by nucleotide sequence SEQ ID NO: 87, and a third polypeptide chain with amino acid sequence SEQ ID NO: 141, encoded by nucleotide sequence SEQ ID NO: 142); and (ii) Janus Trastuzumab LOF, as described in Example 6, including Neu2 with M1D, V6Y, K9D, A93E, I187K, E218A, C219N, C332A, V363R, and L365R substitutions and trastuzumab (including a first polypeptide chain with amino acid sequence SEQ ID NO: 66, encoded by nucleotide sequence SEQ ID NO: 86, a second polypeptide chain with amino acid sequence SEQ ID NO: 67, encoded by nucleotide sequence SEQ ID NO: 87, and a third polypeptide chain with amino acid sequence SEQ ID NO: 147, encoded by nucleotide sequence SEQ ID NO: 148).

[0376] To further characterize the mechanism of Janus Trastuzumab 2 tumor growth inhibition, a pharmacodynamic (PD) study was performed by treating mice carrying established subcutaneous EMT6-HER2 tumors with five doses of Janus Trastuzumab 2 or controls (PBS, trastuzumab, and Janus Trastuzumab LOF) and assessing immune responses in the tumor, draining lymph node, as well as circulation four hours after the fifth and final dose. The experimental design is shown in FIG. 35.

[0377] Tumor growth was inhibited by Janus Trastuzumab 2, compared to Janus Trastuzumab LOF and other controls. However, due to tumor heterogeneity, we observed a variety of tumor size/responses after Janus Trastuzumab 2 treatment. To better evaluate the relationship between Janus Trastuzumab 2 treatment and tumor growth and immune response, tumors were segregated into those with a volume above 500 mm³ as the potential non-responders, namely “Janus Trastuzumab 2-NR” and those with a volume below 350 mm³ as the potential responders, namely “Janus Trastuzumab 2-R”. The tumor size in Janus Trastuzumab 2-R group was significantly smaller than those in Janus Trastuzumab 2-NR group.

[0378] Collected tumors were processed using the mouse Tumor Dissociation kit (Miltenyi #130-096-730) on the gentleMACS™ Octo Dissociator with Heaters (Miltenyi) according to manufacturer's instructions. Cells in suspension (1.5×10⁶) were blocked with TruStain FcX Plus (BioLegend #156604) at 4° C. for 5 minutes. Cells were washed and stained with biotinylated MAL II (Vector Labs #B-1265) in PBS at 4° C. for 30 minutes. After wash with PBS, AF647 Streptavidin (Invitrogen #21374) was added for 30 minutes at 4° C. After washing, cells were stained with Live/Dead near-IR (Molecular Probes #L34976) and surface antibodies for CD45 (clone 30-F11), CD3 (clone 17A2), CD4 (clone RM4-5), CD8 (clone 53-6.7), CD19 (clone 6D5), NKp46 (clone 29A1.4), CD11c (clone N418), CD11b (clone M1/70), F4/80 (clone BM8), Ly6C (clone HK1.4), Ly6G (clone 1A8), CD206 (clone MR6F3), I-A/I-E (clone M5/114.15.2), CD69 (clone H1.2F3), PD-L1 (clone 10F.9G2), and human HER-2 (clone 24D2) in the presence of TruStain FcX in PBS at 4° C. for 20 minutes. BV421 goat anti-human IgG Fcγ (Jackson ImunoResearch #109-675-098) was used in the tumor panels for detection of treatment antibodies. Cells were then fixed with CytoFix™ (BD #554655). Intracellular staining with Foxp3 (clone FJK-16s) and Granzyme B (clone GB11) was done after fixation and permeabilization with Foxp3/Transcription Factor Staining Buffer (eBioscience #00-5523-00). Data was acquired on BD FACSCelesta and analyzed with Flowjo and GraphPad Prism. Details of the tumor cell staining panels were as follows: (i) a T cell panel included CD45, CD3, CD4, CD8, CD19, CD69, Foxp3, Granzyme B, PD-L1, PNA, and live/dead, (ii) a myeloid panel included CD45, CD11c, CD11b, Ly6G, Ly6C, F4/80, CD206, I-A/I-E, PNA, and live/dead, and (iii) a tumor panel included CD45, CD3, CD11b, NKp46, CD19, human HER-2, anti-human IgG Fcγ, live/dead, and MAL II.

[0379] Blood samples were subjected to Ficoll-Paque leukocyte isolation method using standard protocol. Leukocytes were gently collected using a 1 ml pipette and washed with PBS (1% BSA). The cells were blocked with TruStain FcX Plus (BioLegend, catalog: 156604) and staining was continued for desialylation marker PNA using 1 μg/ml PNA (Vector Labs, catalog: B-1075) for 10 minutes on ice and secondary streptavidin-AF647 (Invitrogen, catalog: 21374) at 1:2000 for 10 minutes on ice. After PNA staining cells were stained for 15 minutes on ice with a panel including CD11c-BV650 (Clone N418), CD11b-BV785 (Clone M1/70), CD3-PE-Cy-7 (Clone 500A2), CD8-PE (Clone 53-6.7), NKp46-PerCP/Cyanine5.5 (Clone 29A1.4), CD19-BV605 (Clone 6D5), Ly-6G-APC-R-700 (Clone 1A8), CD14-BV510 (Clone Sa14-2), Live/dead APC-Cy-7, F4/80-FITC (Clone BM8), and TER119-BV421 (Clone TER11). After staining was done, cells were fixed using fixation buffer (Biolegend, catalog: 420801) and run on a BD FACS Celesta machine for data acquisition. The data was analyzed independently using a FlowJO software dongle.

[0380] Draining lymph nodes (dLNs) were enzymatically digested to release the cells from the tissue. More specifically, each dLN was placed in a 1.5 ml tube. 250 μl of digestion mix (Collagenase-P (0.2 mg/ml), Dispase (0.8 mg/ml) and DNase-I (0.1 mg/ml) in serum free RPMI medium) was added to the tube and was incubated at 37° C. for 5 minutes. After 5 minutes the tissue was disrupted by pipetting through a 1 ml pipette tip and incubated for an additional 5 minutes at 37° C. At the end of 5 minutes, the cell suspension was collected and transferred to a tube containing chilled complete medium (10% FBS RPMI). The enzymatic digestion step was repeated one more time with the remaining tissue in the tube for complete digestion. At the end the cells were washed twice to remove residual enzyme mix before moving on to the next step of cell staining. For cell staining two different flow antibody panels were used: (i) a myeloid panel including CD8-Alexa Fluor 488, IA/IE-PE, CD45-PerCP-Cy5.5, CD3-PE-Cy7, PNA/Hydra-9 Alexa Fluor 647, LIVE/DEAD Fixable Near-IR Dead Cell Stain, CD11c-BV421, CD11b-BV650, and CD86-BV785; and (ii) a T cell panel including CD8-Alexa Fluor 488, CD62L-PE, CD45-PerCP-Cy5.5, CD3-PE-Cy7, PNA Alexa Fluor 647, LIVE/DEAD Fixable Near-IR Dead Cell Stain, CD44-Alexa Fluor 700, CD19-BV605, and CD4-BV785.

[0381] Desialylation of tumor cells was confirmed by MAL II lectin staining, with equivalent desialylation observed for the Janus Trastuzumab 2-R tumors and Janus Trastuzumab 2-NR tumors (FIG. 36). No significant tumor desialylation was observed for either the Trastuzumab or Janus Trastuzumab LOF tumors compared to vehicle control.

[0382] A significant increase of CD4⁺ and CD8⁺ T cells in Janus Trastuzumab 2-R tumors was observed compared to Janus Trastuzumab 2-NR and control tumors (FIGS. 37A and 37B). In addition, CD69⁺CD8⁺ and GzmB⁺CD8⁺ T cells were also significantly increased in Janus Trastuzumab 2-R tumors (FIGS. 37C and 37D), indicating infiltration of activated CD8⁺ T cells into the tumor microenvironment. NK cells largely infiltrated into the tumors only in the Janus Trastuzumab 2-R tumors (FIG. 38A).

[0383] The frequency of immune cells in circulation was examined, where an increase in NK cells was found only in the Janus Trastuzumab 2-R tumors (FIG. 38B). Other circulating immune cells were maintained at similar levels as controls. A significant drop of M2 (CD206⁺MHC-II⁻) tumor associated macrophages (TAM) was observed in the Janus Trastuzumab 2-R tumors, compared to Janus Trastuzumab 2-NR and other controls (FIG. 38C). In comparison, no changes were observed on M1 (CD206⁻MHC-II⁺) TAMs as well as myeloid-derived suppressor cells (MDSC), including both G-MDSCs and M-MDSCs across all groups.

[0384] An increased frequency of CD8⁺ and CD4⁺ T cells was also observed in the draining lymph nodes (dLN) in the Janus Trastuzumab 2-R tumors (FIGS. 39A and 39B) compared to other groups, indicating the activation of a T cell response in the dLN with Janus Trastuzumab 2 treatment.

[0385] Desialylation of circulating blood cells was also evaluated. Janus Trastuzumab 2 treatment had no effect on red blood cell (RBC) sialylation status (FIG. 40A). In comparison, Janus Trastuzumab 2 treatment desialylated NK, myeloid cells, and neutrophils significantly, and showed a trend of desialylation on T cells, especially in the Janus Trastuzumab 2-R group (FIGS. 40B-40F).

[0386] Next, tumor gene expression profiles were evaluated using Nanostring technology. Frozen tumor tissues were processed for RNA extraction using an RNA extraction kit from Macherey Nagel. The samples were quantified and batched into the optimal desired concentration range and run on nCounter Sprint profiler against PanCancer IO 360™ Panel for Mouse. Data was acquired, QC'ed and analyzed using nanoString software nSolver. Results are shown in TABLE 33 (where values equal a log 2 fold change). Janus Trastuzumab 2 treatment augmented CD3, CD4, and CD8 levels by 6-, 7-, and 5-fold, respectively, in Janus Trastuzumab 2-R tumors compared to Janus Trastuzumab 2-NR tumors (TABLE 33). Upregulation of multiple checkpoint genes (Cd274, Ctla4, Pdcd1, Icos, and Lag3) was observed, as well as cytokine genes (Il-6, Il-2, Il-1β, Ifn-γ, Ifn-α1, Mx1, and Gzmb) and chemokine genes (Cxcl9, Cxcl12, and CCL5) in Janus Trastuzumab 2-R tumors, compared to Janus Trastuzumab 2-NR tumors (TABLE 33).

TABLE 33
Tumor gene expression profile characterized by Nanostring

| | | | | Janus | Janus | Janus |
|---|---|---|---|---|---|---|
| | | | | Trastuzumab | Trastuzumab | Trastuzumab |
| | Genes | PBS | Trastuzumab | LOF | 2-NR | 2-R |
| Immune | Cd3 | 1.96 | 3.55 | 2.32 | 1 | 6.25 |
| Cell genes | Cd4 | 1.97 | 3.66 | 1.6 | 1 | 7.02 |
| | Cd8 | 2.08 | 3.66 | 2.19 | 1 | 5 |
| Checkpoint | Cd274 | 1.85 | 1.91 | 3.16 | 1 | 8.99 |
| genes | Ctla4 | 1.52 | 1.83 | 1.85 | 1 | 6.5 |
| | Icos | 1.77 | 2.44 | 2.18 | 1 | 4.69 |
| | Pdcd1 | 1.13 | 1.85 | 1.64 | 1 | 2.17 |
| | Lag3 | 2.22 | 2.94 | 2.34 | 1 | 4.03 |
| Cytokine | Il6 | −1.41 | −1.09 | 1.32 | 1 | 4.29 |
| genes | Il1b | 1.38 | 1.63 | 1.52 | 1 | 4.15 |
| | Il2 | 1.38 | 1.49 | 1.08 | 1 | 2.57 |
| | Ifng | 1.57 | 2.52 | 1.48 | 1 | 4.04 |
| | Ifna1 | 1.34 | 1.56 | 1.33 | 1 | 5.01 |
| | Mx1 | 1.73 | 1.36 | 1.85 | 1 | 4.15 |
| | Gzmb | 2.25 | 1.84 | 4.22 | 1 | 4.93 |
| Chemokine | Cxcl9 | 1.54 | 1.15 | 2.14 | 1 | 5.09 |
| genes | Cxcl12 | 1.48 | 2.62 | 2.11 | 1 | 8.95 |
| | Ccl5 | 1.39 | 1.54 | 2.15 | 1 | 5.52 |

[0387] Taken together, these results demonstrate that treatment with an antibody sialidase conjugate, e.g., an anti-HER2 antibody sialidase conjugate, e.g., Janus Trastuzumab 2, augments immune cell infiltration and activation in tumor, draining lymph nodes, and circulation.

### INCORPORATION BY REFERENCE

[0388] The entire disclosure of each of the patent and scientific documents referred to herein is incorporated by reference for all purposes.

### EQUIVALENTS

[0389] The invention may be embodied in other specific forms without departing from the spirit or essential characteristics thereof. The foregoing embodiments are therefore to be considered in all respects illustrative rather than limiting on the invention described herein. Scope of the invention is thus indicated by the appended claims rather than by the foregoing description, and all changes that come within the meaning and range of equivalency of the claims are intended to be embraced therein.

SEQUENCE LISTING

SEQ ID NO: 1:
MASLPVLQKESVFQSGAHAYRIPALLYLPGQQSLLAFAEQRASKKDEHAELIVLRRGDYDAP
THQVQWQAQEVVAQARLDGHRSMNPCPLYDAQTGTLFLFFIAIPGQVTEQQQLQTRANVTRL
CQVTSTDHGRTWSSPRDLTDAAIGPAYREWSTFAVGPGHCLQLHDRARSLVVPAYAYRKLHP
IQRPIPSAFCFLSHDHGRTWARGHFVAQDTLECQVAEVETGEQRVVTLNARSHLRARVQAQS
TNDGLDFQESQLVKKLVEPPPQGCQGSVISFPSPRSGPGSPAQWLLYTHPTHSWQRADLGAY
LNPRPPAPEAWSEPVLLAKGSCAYSDLQSMGTGPDGSPLFGCLYEANDYEEIVFLMFTLKQA
FPAEYLPQ
SEQ ID NO: 2:
MEDLRPMATCPVLQKETLFRTGVHAYRIPALLYLKKQKTLLAFAEKRASKTDEHAELIVLRR
GSYNEATNRVKWQPEEVVTQAQLEGHRSMNPCPLYDKQTKTLFLFFIAVPGRVSEHHQLHTK
VNVTRLCCVSSTDHGRTWSPIQDLTETTIGSTHQEWATFAVGPGHCLQLRNPAGSLLVPAYA
YRKLHPAQKPTPFAFCFISLDHGHTWKLGNFVAENSLECQVAEVGTGAQRMVYLNARSFLGA
RVQAQSPNDGLDFQDNRVVSKLVEPPHGCHGSVVAFHNPISKPHALDTWLLYTHPTDSRNRT
NLGVYLNQMPLDPTAWSEPTLLAMGICAYSDLQNMGQGPDGSPQFGCLYESGNYEEIIFLIF
TLKQAFPTVFDAQ
SEQ ID NO: 3:
EDLRP
SEQ ID NO: 4:
MEDLRP
SEQ ID NO: 5:
DKTHTCPPCPAPELLGGPSVFLFPPKPKDTLMISRTPEVTCVVVDVSHEDPEVKFNWYVDGV
EVHNAKTKPREEQYNSTYRVVSVLTVLHQDWLNGKEYKCKVSNKALPAPIEKTISKAKGQPR
EPQVYTLPPSREEMTKNQVSLTCLVKGFYPSDIAVEWESNGQPENNYKTTPPVLDSDGSFFL
YSKLTVDKSRWQQGNVFSCSVMHEALHNHYTQKSLSLSPGK
SEQ ID NO: 6:
ACAGTGGAAAAGTCCGTGGTGTTCAAGGCCGAGGGCGAGCACTTCACCGACCAGAAAGGCAA
TACCATCGTCGGCTCTGGCAGCGGCGGCACCACCAAGTACTTTAGAATCCCCGCCATGTGCA
CCACCAGCAAGGGCACCATTGTGGTGTTCGCCGACGCCAGACACAACACCGCCAGCGATCAG
AGCTTCATCGATACCGCTGCCGCCAGATCTACCGATGGCGGCAAGACCTGGAACAAGAAGAT
CGCCATCTACAACGACCGCGTGAACAGCAAGCTGAGCAGAGTGATGGACCCTACCTGCATCG
TGGCCAACATCCAGGGCAGAGAAACCATCCTGGTCATGGTCGGAAAGTGGAACAACAACGAT
AAGACCTGGGGCGCCTACAGAGACAAGGCCCCTGATACCGATTGGGACCTCGTGCTGTACAA
GAGCACCGATGACGGCGTGACCTTCAGCAAGGTGGAAACAAACATCCACGACATCGTGACCA
AGAACGGCACCATCTCTGCCATGCTCGGCGGCGTTGGATCTGGCCTGCAACTGAATGATGGC
AAGCTGGTGTTCCCCGTGCAGATGGTCCGAACAAAGAATATCACCACCGTGCTGAATACCAG
CTTCATCTACAGCACCGACGGCATCACATGGTCCCTGCCTAGCGGCTACTGTGAAGGCTTTG
GCAGCGAGAACAACATCATCGAGTTCAACGCCAGCCTGGTCAACAACATCCGGAACAGCGGC
CTGCGGAGAAGCTTCGAGACAAAGGACTTCGGAAAGACGTGGACCGAGTTTCCTCCAATGGA
CAAGAAGGTGGACAACCGGAACCACGGCGTGCAGGGCAGCACAATCACAATCCCTAGCGGCA
ACAAACTGGTGGCCGCTCACTCTAGCGCCCAGAACAAGAACAACGACTACACCAGAAGCGAC
ATCAGCCTGTACGCCCACAACCTGTACAGCGGCGAAGTGAAGCTGATCGACGACTTCTACCC
CAAAGTGGGCAATGCCAGCGGAGCCGGCTACAGCTGTCTGAGCTACCGGAAAAATGTGGACA
AAGAAACCCTGTACGTGGTGTACGAGGCCAACGGCAGCATCGAGTTTCAGGACCTGAGCAGA
CATCTGCCCGTGATCAAGAGCTACAAC
SEQ ID NO: 7:
ENDFGLVQPLVTMEQLLWVSGRQIGSVDTFRIPLITATPRGTLLAFAEARKMSSSDEGAKFI
ALRRSMDQGSTWSPTAFIVNDGDVPDGLNLGAVVSDVETGVVFLFYSLCAHKAGCQVASTML
VWSKDDGVSWSTPRNLSLDIGTEVFAPGPGSGIQKQREPRKGRLIVCGHGTLERDGVFCLLS
DDHGASWRYGSGVSGIPYGQPKQENDFNPDECQPYELPDGSVVINARNQNNYHCHCRIVLRS
YDACDTLRPRDVTFDPELVDPVVAAGAVVTSSGIVFFSNPAHPEFRVNLTLRWSFSNGTSWR
KETVQLWPGPSGYSSLATLEGSMDGEEQAPQLYVLYEKGRNHYTESISVAKISV
SEQ ID NO: 8:
MEEVTTCSFNSPLFRQEDDRGITYRIPALLYIPPTHTFLAFAEKRSTRRDEDALHLVLRRGL
RIGQLVQWGPLKPLMEATLPGHRTMNPCPVWEQKSGCVFLFFICVRGHVTERQQIVSGRNAA
RLCFIYSQDAGCSWSEVRDLTEEVIGSELKHWATFAVGPGHGIQLQSGRLVIPAYTYYIPSW
FFCFQLPCKTRPHSLMIYSDDLGVTWHHGRLIRPMVTVECEVAEVTGRAGHPVLYCSARTPN
RCRAEALSTDHGEGFQRLALSRQLCEPPHGCQGSVVSFRPLEIPHRCQDSSSKDAPTIQQSS
PGSSLRLEEEAGTPSESWLLYSHPTSRKQRVDLGIYLNQTPLEAACWSRPWILHCGPCGYSD
LAALEEEGLFGCLFECGTKQECEQIAFRLFTHREILSHLQGDCTSPGRNPSQFKSN
SEQ ID NO: 9:
MRPADLPPRPMEESPASSSAPTETEEPGSSAEVMEEVTTCSFNSPLFRQEDDRGITYRIPAL
LYIPPTHTFLAFAEKRSTRRDEDALHLVLRRGLRIGQLVQWGPLKPLMEATLPGHRTMNPCP
VWEQKSGCVFLFFICVRGHVTERQQIVSGRNAARLCFIYSQDAGCSWSEVRDLTEEVIGSEL
KHWATFAVGPGHGIQLQSGRLVIPAYTYYIPSWFFCFQLPCKTRPHSLMIYSDDLGVTWHHG
RLIRPMVTVECEVAEVTGRAGHPVLYCSARTPNRCRAEALSTDHGEGFQRLALSRQLCEPPH
GCQGSWSFRPLEIPHRCQDSSSKDAPTIQQSSPGSSLRLEEEAGTPSESWLLYSHPTSRKQ
RVDLGIYLNQTPLEAACWSRPWILHCGPCGYSDLAALEEEGLFGCLFECGTKQECEQIAFRL
FTHREILSHLQGDCTSPGRNPSQFKSN
SEQ ID NO: 10:
MGVPRTPSRTVLFERERTGLTYRVPSLLPVPPGPTLLAFVEQRLSPDDSHAHRLVLRRGTLA
GGSVRWGALHVLGTAALAEHRSMNPCPVHDAGTGTVFLFFIAVLGHTPEAVQIATGRNAARL
CCVASRDAGLSWGSARDLTEEAIGGAVQDWATFAVGPGHGVQLPSGRLLVPAYTYRVDRREC
FGKICRTSPHSFAFYSDDHGRTWRCGGLVPNLRSGECQLAAVDGGQAGSFLYCNARSPLGSR
VQALSTDEGTSFLPAERVASLPETAWGCQGSIVGFPAPAPNRPRDDSWSVGPGSPLQPPLLG
PGVHEPPEEAAVDPRGGQVPGGPFSRLQPRGDGPRQPGPRPGVSGDVGSWTLALPMPFAAPP
QSPTWLLYSHPVGRRARLHMGIRLSQSPLDPRSWTEPWVIYEGPSGYSDLASIGPAPEGGLV
FACLYESGARTSYDEISFCTFSLREVLENVPASPKPPNLGDKPRGCCWPS
SEQ ID NO: 11:
MMSSAAFPRWLSMGVPRTPSRTVLFERERTGLTYRVPSLLPVPPGPTLLAFVEQRLSPDDSH
AHRLVLRRGTLAGGSVRWGALHVLGTAALAEHRSMNPCPVHDAGTGTVFLFFIAVLGHTPEA
VQIATGRNAARLCCVASRDAGLSWGSARDLTEEAIGGAVQDWATFAVGPGHGVQLPSGRLLV
PAYTYRVDRRECFGKICRTSPHSFAFYSDDHGRTWRCGGLVPNLRSGECQLAAVDGGQAGSF
LYCNARSPLGSRVQALSTDEGTSFLPAERVASLPETAWGCQGSIVGFPAPAPNRPRDDSWSV
GPGSPLQPPLLGPGVHEPPEEAAVDPRGGQVPGGPFSRLQPRGDGPRQPGPRPGVSGDVGSW
TLALPMPFAAPPQSPTWLLYSHPVGRRARLHMGIRLSQSPLDPRSWTEPWVIYEGPSGYSDL
ASIGPAPEGGLVFACLYESGARTSYDEISFCTFSLREVLENVPASPKPPNLGDKPRGCCWPS
SEQ ID NO: 12:
MASLP
SEQ ID NO: 13:
ASLP
SEQ ID NO: 14:
TVEKSVVF
SEQ ID NO: 15:
GDYDAPTHQVQW
SEQ ID NO: 16:
SMDQGSTW
SEQ ID NO: 17:
STDGGKTW
SEQ ID NO: 18:
PRPPAPEA
SEQ ID NO: 19:
QTPLEAAC
SEQ ID NO: 20:
NPRPPAPEA
SEQ ID NO: 21:
SQNDGES
SEQ ID NO: 22:
LSHSLST
SEQ ID NO: 23:
GAGAACGACTTTGGACTGGTGCAGCCTCTGGTCACCATGGAACAGCTGCTGTGGGTTTCCGG
CAGACAGATCGGCAGCGTGGACACCTTCAGAATCCCTCTGATCACCGCCACACCTAGAGGCA
CCCTGCTGGCCTTTGCCGAGGCCAGAAAGATGAGCAGCTCTGACGAGGGCGCCAAGTTTATT
GCCCTGAGGCGGTCTATGGACCAGGGCTCTACATGGTCCCCTACCGCCTTCATCGTGAACGA
TGGCGACGTGCCCGATGGCCTGAATCTGGGAGCTGTGGTGTCCGATGTGGAAACCGGCGTGG
TGTTCCTGTTCTACAGCCTGTGTGCCCACAAGGCCGGTTGTCAGGTGGCCAGCACAATGCTC
GTGTGGTCCAAGGACGACGGCGTGTCCTGGTCTACCCCTAGAAACCTGAGCCTGGACATCGG
CACCGAAGTGTTTGCTCCAGGACCTGGCTCTGGCATCCAGAAGCAGAGAGAGCCCAGAAAGG
GCAGACTGATCGTGTGTGGCCACGGCACCCTTGAGAGAGATGGCGTTTTCTGCCTGCTGAGC
GACGATCATGGCGCCTCTTGGAGATACGGCAGCGGAGTGTCTGGAATCCCTTACGGCCAGCC
TAAGCAAGAGAACGATTTCAACCCCGACGAGTGCCAGCCTTACGAGCTGCCTGATGGCAGCG
TCGTGATCAACGCCCGGAACCAGAACAACTACCACTGCCACTGCCGGATCGTGCTGAGAAGC
TACGACGCCTGCGATACCCTGCGGCCTAGAGATGTGACCTTCGATCCTGAGCTGGTGGACCC
TGTTGTTGCCGCTGGTGCCGTCGTGACATCTAGCGGCATCGTGTTCTTCAGCAACCCTGCTC
ACCCCGAGTTCAGAGTGAATCTGACCCTGCGGTGGTCCTTCAGCAATGGCACAAGCTGGCGG
AAAGAAACCGTGCAGCTTTGGCCTGGACCTAGCGGCTACTCTTCTCTGGCTACACTGGAAGG
CAGCATGGACGGCGAAGAACAGGCCCCTCAGCTGTACGTGCTGTACGAGAAGGGCAGAAACC
ACTAGACCGAGAGCATCAGCGTGGCCAAGATCAGCGTT
SEQ ID NO: 24:
ATGGCCAGCCTGCCTGTGCTGCAGAAAGAAAGCGTGTTCCAGTCTGGCGCCCACGCCTACAG
AATTCCCGCTCTGCTGTATCTGCCAGGCCAGCAGTCTCTGCTGGCTTTCGCTGAACAGCGGG
CCAGCAAGAAGGATGAGCACGCCGAACTGATCGTGCTGCGGAGAGGCGATTACGACGCCCCT
ACACATCAGGTGCAGTGGCAGGCTCAAGAGGTGGTGGCTCAGGCTAGACTGGACGGCCACAG
ATCTATGAACCCCTGTCCTCTGTACGATGCCCAGACCGGCACACTGTTTCTGTTCTTTATCG
CTATCCCCGGCCAAGTGACCGAGCAGCAGCAGCTGCAGACAAGAGCCAACGTGACCAGACTG
TGTCAAGTGACCTCCACCGACCACGGCAGAACCTGGTCTAGCCCTAGAGATCTGACCGACGC
CGCCATCGGACCTGCCTATAGAGAGTGGTCCACCTTCGCCGTTGGACCTGGACACTGTCTCC
AGCTGCACGACAGGGCTAGATCTCTGGTGGTGCCTGCCTACGCCTATAGAAAGCTGCACCCC
ATCCAGCGGCCTATTCCTAGCGCCTTCTGCTTTCTGAGCCACGATCACGGCAGGACATGGGC
CAGAGGACATTTCGTGGCCCAGGACACACTGGAATGCCAGGTGGCCGAAGTGGAAACCGGCG
AGCAGAGAGTCGTGACCCTGAACGCCAGATCTCACCTGAGAGCCAGAGTGCAGGCCCAGAGC
ACAAACGACGGCCTGGATTTCCAAGAGAGCCAGCTGGTCAAGAAACTGGTGGAACCTCCTCC
ACAGGGCTGTCAGGGAAGCGTGATCAGCTTTCCATCTCCTAGAAGCGGCCCTGGCTCTCCTG
CTCAGTGGCTGCTGTATACACACCCCACACACAGCTGGCAGAGAGCCGATCTGGGCGCCTAC
CTGAATCCTAGACCTCCTGCTCCTGAGGCTTGGAGCGAACCTGTTCTGCTGGCCAAGGGCAG
CTGTGCCTACAGCGATCTGCAGTCTATGGGCACAGGCCCTGATGGCAGCCCTCTGTTTGGCT
GTCTGTACGAGGCCAACGACTACGAAGAGATCGTGTTCCTGATGTTCACCCTGAAGCAGGCC
TTTCCAGCCGAGTACCTGCCTCAA
SEQ ID NO: 25:
ATGGAGGAAGTGACCACCTGTAGCTTCAACAGCCCTCTGTTCCGGCAAGAGGACGACCGGGG
CATCACCTACAGAATCCCTGCTCTGCTGTACATCCCTCCTACACACACCTTTCTGGCCTTCG
CCGAGAAGCGGAGCACCAGACGAGATGAAGATGCCCTGCACCTGGTGCTGAGAAGAGGCCTG
AGAATCGGACAGCTGGTGCAGTGGGGACCTCTGAAGCCTCTGATGGAAGCCACACTGCCCGG
CCACAGAACCATGAATCCTTGTCCTGTGTGGGAGCAGAAAAGCGGCTGCGTGTTCCTGTTCT
TCATCTGCGTGCGGGGCCACGTGACCGAGAGACAGCAAATCGTGTCCGGCAGAAACGCCGCC
AGACTGTGCTTCATCTACAGCCAGGATGCCGGCTGCTCTTGGAGCGAAGTTCGGGATCTGAC
CGAAGAAGTGATCGGCAGCGAGCTGAAGCACTGGGCCACATTTGCTGTTGGCCCTGGCCACG
GAATCCAGCTGCAATCTGGCAGACTGGTCATCCCCGCCTACACCTACTATATCCCCAGCTGG
TTCTTCTGCTTCCAACTGCCTTGCAAGACCCGGCCTCACAGCCTGATGATCTACAGCGACGA
TCTGGGCGTGACATGGCACCACGGCAGACTGATCAGACCCATGGTCACCGTGGAATGCGAGG
TGGCCGAAGTGACAGGCAGAGCTGGACACCCTGTGCTGTACTGCTCTGCCAGAACACCCAAC
CGGTGTAGAGCCGAGGCTCTGTCTACAGATCACGGCGAGGGCTTTCAGAGACTGGCCCTCTC
TAGACAGCTGTGCGAACCTCCTCATGGCTGTCAGGGCAGCGTGGTGTCCTTCAGACCTCTGG
AAATCCCTCACCGGTGCCAGGACAGCAGCTCTAAGGATGCCCCTACCATCCAGCAGTCTAGC
CCTGGCAGCAGCCTGAGACTGGAAGAGGAAGCCGGAACACCTAGCGAGAGCTGGCTGCTGTA
CTCTCACCCCACCAGCAGAAAGCAGAGAGTGGACCTGGGCATCTACCTGAATCAGACCCCTC
TGGAAGCCGCCTGTTGGAGCAGACCTTGGATTCTGCACTGTGGCCCTTGCGGCTACTCTGAT
CTGGCCGCTCTGGAAGAAGAGGGCCTGTTCGGCTGCCTGTTTGAGTGCGGCACAAAGCAAGA
GTGCGAGCAGATCGCCTTCCGGCTGTTCACCCACAGAGAGATCCTGAGCCATCTGCAGGGCG
ACTGCACAAGCCCAGGCAGAAATCCCAGCCAGTTCAAGAGCAAC
SEQ ID NO: 26:
ATGGGCGTGCCCAGAACACCCAGCAGAACCGTGCTGTTCGAGAGAGAGAGGACCGGCCTGAC
CTACAGAGTGCCTTCTCTGCTGCCTGTGCCTCCTGGACCTACACTGCTGGCCTTCGTGGAAC
AGAGACTGAGCCCCGATGATTCTCACGCCCACAGACTGGTGCTGAGAAGAGGAACACTGGCT
GGCGGCTCTGTTAGATGGGGAGCACTGCATGTGCTGGGCACAGCTGCTCTTGCCGAGCACAG
ATCCATGAATCCCTGTCCTGTGCACGACGCCGGAACCGGCACAGTGTTTCTGTTCTTTATCG
CCGTGCTGGGCCACACACCTGAGGCCGTTCAAATTGCCACCGGCAGAAATGCCGCCAGACTG
TGTTGTGTGGCCTCCAGAGATGCCGGCCTGTCTTGGGGATCTGCCAGAGATCTGACCGAGGA
AGCCATTGGCGGAGCCGTTCAGGATTGGGCCACATTTGCTGTTGGACCTGGACACGGCGTGC
AGCTGCCAAGTGGTAGACTGCTGGTGCCTGCCTACACATACAGAGTGGATCGGAGAGAGTGC
TTCGGAAAGATCTGCCGGACAAGCCCTCACAGCTTCGCCTTCTACTCCGACGATCACGGCCG
GACTTGGAGATGTGGTGGCCTGGTGCCTAATCTGAGAAGCGGCGAATGTCAACTGGCCGCCG
TTGATGGTGGACAGGCTGGCAGCTTCCTGTACTGCAACGCCAGATCTCCTCTGGGCTCTAGA
GTGCAGGCCCTGTCTACCGATGAGGGCACCAGTTTTCTGCCCGCCGAAAGAGTTGCCTCTCT
GCCTGAAACAGCCTGGGGCTGTCAGGGCTCTATCGTGGGATTTCCTGCTCCTGCTCCAAACA
GACCCCGGGACGATTCTTGGAGTGTCGGCCCTGGATCTCCACTGCAGCCTCCATTGCTTGGA
CCAGGCGTTCACGAGCCACCTGAAGAGGCTGCCGTTGATCCTAGAGGCGGACAAGTTCCTGG
CGGCCCTTTTAGCAGACTGCAGCCAAGAGGCGACGGCCCTAGACAACCTGGACCAAGACCTG
GCGTCAGCGGAGATGTTGGCTCTTGGACACTGGCCCTGCCTATGCCTTTTGCCGCTCCTCCT
CAGTCTCCTACCTGGCTGCTGTACTCTCACCCTGTTGGCAGACGGGCCAGACTGCACATGGG
CATCAGACTGTCTCAGAGCCCTCTGGACCCCAGAAGCTGGACAGAGCCTTGGGTCATCTATG
AGGGCCCTAGCGGCTACAGCGATCTGGCCTCTATTGGCCCAGCTCCTGAAGGCGGACTGGTG
TTCGCTTGTCTGTATGAGAGCGGCGCCAGAACCAGCTACGACGAGATCAGCTTCTGCACCTT
CAGCCTGCGCGAGGTGCTGGAAAATGTGCCCGCCTCTCCTAAGCCTCCTAACCTGGGCGATA
AGCCTAGAGGCTGTTGCTGGCCATCT
SEQ ID NO: 27:
MTGERPSTALPDRRWGPRILGFWGGCRVWVFAAIFLLLSLAASWSKA
SEQ ID NO: 28:
MDMRVPAQLLGLLLLWLPGARC
SEQ ID NO: 29:
YGTL
SEQ ID NO: 30:
MTVEKSVVFKAEGEHFTDQKGNTIVGSGSGGTTKYFRIPAMCTTSKGTIVVFADARHNTASD
QSFIDTAAARSTDGGKTWNKKIAIYNDRVNSKLSRVMDPTCIVANIQGRETILVMVGKWNNN
DKTWGAYRDKAPDTDWDLVLYKSTDDGVTFSKVETNIHDIVTKNGTISAMLGGVGSGLQLND
GKLVFPVQMVRTKNITTVLNTSFIYSTDGITWSLPSGYCEGFGSENNIIEFNASLVNNIRNS
GLRRSFETKDFGKTWTEFPPMDKKVDNRNHGVQGSTITIPSGNKLVAAHSSAQNKNNDYTRS
DISLYAHNLYSGEVKLIDDFYPKVGNASGAGYSCLSYRKNVDKETLYVVYEANGSIEFQDLS
RHLPVIKSYN
SEQ ID NO: 31:
EPKSCDKTHTCPPCPAPELLGGPSVFLFPPKPKDTLMISRTPEVTCVVVDVSHEDPEVKFNW
YVDGVEVHNAKTKPREEQYNSTYRVVSVLTVLHQDWLNGKEYKCKVSNKALPAPIEKTISKA
KGQPREPQVYTLPPSREEMTKNQVSLTCLVKGFYPSDIAVEWESNGQPENNYKTTPPVLDSD
GSFFLYSKLTVDKSRWQQGNVFSCSVMHEALHNHYTQKSLSLSPGK
SEQ ID NO: 32:
DKTHTCPPCPAPELLGGPSVFLFPPKPKDTLMISRTPEVTCVVVDVSHEDPEVKFNWYVDGV
EVHNAKTKPREEQYNSTYRVVSVLTVLHQDWLNGKEYKCKVSNKALPAPIEKTISKAKGQPR
EPQVYTLPPSREEMTKNQVSLTCLVKGFYPSDIAVEWESNGQPENNYKTTPPVLDSDGSFFL
TSKLTVDKSRWQQGNVFSCSVMHEALHNHYTQKSLSLSPGK
SEQ ID NO: 33:
EPKSCDKTHTCPPCPAPELLGGPSVFLFPPKPKDTLMISRTPEVTCVVVDVSHEDPEVKFNW
YVDGVEVHNAKTKPREEQYNSTYRVVSVLTVLHQDWLNGKEYKCKVSNKALPAPIEKTISKA
KGQPREPQVYTLPPSREEMTKNQVSLYCLVKGFYPSDIAVEWESNGQPENNYKTTPPVLDSD
GSFFLYSKLTVDKSRWQQGNVFSCSVMHEALHNHYTQKSLSLSPGK
SEQ ID NO: 34:
ATGAGACCTGCGGACCTGCCCCCGCGCCCCATGGAAGAATCCCCGGCGTCCAGCTCTGCCCC
GACAGAGACGGAGGAGCCGGGGTCCAGTGCAGAGGTCATGGAAGAAGTGACAACATGCTCCT
TCAACAGCCCTCTGTTCCGGCAGGAAGATGACAGAGGGATTACCTACCGGATCCCAGCCCTG
CTCTACATACCCCCCACCCACACCTTCCTGGCCTTTGCAGAGAAGCGTTCTACGAGGAGAGA
TGAGGATGCTCTCCACCTGGTGCTGAGGCGAGGGTTGAGGATTGGGCAGTTGGTACAGTGGG
GGCCCCTGAAGCCACTGATGGAAGCCACACTACCGGGGCATCGGACCATGAACCCCTGTCCT
GTATGGGAGCAGAAGAGTGGTTGTGTGTTCCTGTTCTTCATCTGTGTGCGGGGCCATGTCAC
AGAGCGTCAACAGATTGTGTCAGGCAGGAATGCTGCCCGCCTTTGCTTCATCTACAGTCAGG
ATGCTGGATGTTCATGGAGTGAGGTGAGGGACTTGACTGAGGAGGTCATTGGCTCAGAGCTG
AAGCACTGGGCCACATTTGCTGTGGGCCCAGGTCATGGCATCCAGCTGCAGTCAGGGAGACT
GGTCATCCCTGCGTATACCTACTACATCCCTTCCTGGTTCTTTTGCTTCCAGCTACCATGTA
AAACCAGGCCTCATTCTCTGATGATCTACAGTGATGACCTAGGGGTCACATGGCACCATGGT
AGACTCATTAGGCCCATGGTTACAGTAGAATGTGAAGTGGCAGAGGTGACTGGGAGGGCTGG
CCACCCTGTGCTATATTGCAGTGCCCGGACACCAAACAGGTGCCGGGCAGAGGCGCTCAGCA
CTGACCATGGTGAAGGCTTTCAGAGACTGGCCCTGAGTCGACAGCTCTGTGAGCCCCCACAT
GGTTGCCAAGGGAGTGTGGTAAGTTTCCGGCCCCTGGAGATCCCACATAGGTGCCAGGACTC
TAGCAGCAAAGATGCACCCACCATTCAGCAGAGCTCTCCAGGCAGTTCACTGAGGCTGGAGG
AGGAAGCTGGAACACCGTCAGAATCATGGCTCTTGTACTCACACCCAACCAGTAGGAAACAG
AGGGTTGACCTAGGTATCTATCTCAACCAGACCCCCTTGGAGGCTGCCTGCTGGTCCCGCCC
CTGGATCTTGCACTGTGGGCCCTGTGGCTACTCTGATCTGGCTGCTCTGGAGGAGGAGGGCT
TGTTTGGGTGTTTGTTTGAATGTGGGACCAAGCAAGAGTGTGAGCAGATTGCCTTCCGCCTG
TTTACACACCGGGAGATCCTGAGTCACCTGCAGGGGGACTGCACCAGCCCTGGTAGGAACCC
AAGCCAATTCAAAAGCAAT
SEQ ID NO: 35:
ATGATGAGCTCTGCAGCCTTCCCAAGGTGGCTGAGCATGGGGGTCCCTCGTACCCCTTCACG
GACAGTGCTCTTCGAGCGGGAGAGGACGGGCCTGACCTACCGCGTGCCCTCGCTGCTCCCCG
TGCCCCCCGGGCCCACCCTGCTGGCCTTTGTGGAGCAGCGGCTCAGCCCTGACGACTCCCAC
GCCCACCGCCTGGTGCTGAGGAGGGGCACGCTGGCCGGGGGCTCCGTGCGGTGGGGTGCCCT
GCACGTGCTGGGGACAGCAGCCCTGGCGGAGCACCGGTCCATGAACCCCTGCCCTGTGCACG
ATGCTGGCACGGGCACCGTCTTCCTCTTCTTCATCGCGGTGCTGGGCCACACGCCTGAGGCC
GTGCAGATCGCCACGGGAAGGAACGCCGCGCGCCTCTGCTGTGTGGCCAGCCGTGACGCCGG
CCTCTCGTGGGGCAGCGCCCGGGACCTCACCGAGGAGGCCATCGGTGGTGCCGTGCAGGACT
GGGCCACATTCGCTGTGGGTCCCGGCCACGGTGTGCAGCTGCCCTCAGGCCGCCTGCTGGTA
CCCGCCTACACCTACCGCGTGGACCGCCGAGAGTGTTTTGGCAAGATCTGCCGGACCAGCCC
TCACTCCTTCGCCTTCTACAGCGATGACCACGGCCGCACCTGGCGCTGTGGAGGCCTCGTGC
CCAACCTGCGCTCAGGCGAGTGCCAGCTGGCAGCGGTGGACGGTGGGCAGGCCGGCAGCTTC
CTCTACTGCAATGCCCGGAGCCCACTGGGCAGCCGTGTGCAGGCGCTCAGCACTGACGAGGG
CACCTCCTTCCTGCCCGCAGAGCGCGTGGCTTCCCTGCCCGAGACTGCCTGGGGCTGCCAGG
GCAGCATCGTGGGCTTCCCAGCCCCCGCCCCCAACAGGCCACGGGATGACAGTTGGTCAGTG
GGCCCCGGGAGTCCCCTCCAGCCTCCACTCCTCGGTCCTGGAGTCCACGAACCCCCAGAGGA
GGCTGCTGTAGACCCCCGTGGAGGCCAGGTGCCTGGTGGGCCCTTCAGCCGTCTGCAGCCTC
GGGGGGATGGCCCCAGGCAGCCTGGCCCCAGGCCTGGGGTCAGTGGGGATGTGGGGTCCTGG
ACCCTGGCACTCCCCATGCCCTTTGCTGCCCCGCCCCAGAGCCCCACGTGGCTGCTGTACTC
CCACCCAGTGGGGCGCAGGGCTCGGCTACACATGGGTATCCGCCTGAGCCAGTCCCCGCTGG
ACCCGCGCAGCTGGACAGAGCCCTGGGTGATCTACGAGGGCCCCAGCGGCTACTCCGACCTG
GCGTCCATCGGGCCGGCCCCTGAGGGGGGCCTGGTTTTTGCCTGCCTGTACGAGAGCGGGGC
CAGGACCTCCTATGATGAGATTTCCTTTTGTACATTCTCCCTGCGTGAGGTCCTGGAGAACG
TGCCCGCCAGCCCCAAACCGCCCAACCTTGGGGACAAGCCTCGGGGGTGCTGCTGGCCCTCC
SEQ ID NO: 36:
MRFKNVKKTALMLAMFGMATSSNAALFDYNATGDTEFDSPAKQGWMQDNTNNGSGVLTNADG
MPAWLVQGIGGRAQWTYSLSTNQHAQASSFGWRMTTEMKVLSGGMITNYYANGTQRVLPIIS
LDSSGNLVVEFEGQTGRTVLATGTAATEYHKFELVFLPGSNPSASFYFDGKLIRDNIQPTAS
KQNMIVWGNGSSNTDGVAAYRDIKFEIQGDVIFRGPDRIPSIVASSVTPGVVTAFAEKRVGG
GDPGALSNTNDIITRTSRDGGITWDTELNLTEQINVSDEFDFSDPRPIYDPSSNTVLVSYAR
WPTDAAQNGDRIKPWMPNGIFYSVYDVASGNWQAPIDVTDQVKERSFQIAGWGGSELYRRNT
SLNSQQDWQSNAKIRIVDGAANQIQVADGSRKYVVTLSIDESGGLVANLNGVSAPIILQSEH
AKVHSFHDYELQYSALNHTTTLFVDGQQITTWAGEVSQENNIQFGNADAQIDGRLHVQKIVL
TQQGHNLVEFDAFYLAQQTPEVEKDLEKLGWTKIKTGNTMSLYGNASVNPGPGHGITLTRQQ
NISGSQNGRLIYPAIVLDRFFLNVMSIYSDDGGSNWQTGSTLPIPFRWKSSSILETLEPSEA
DMVELQNGDLLLTARLDFNQIVNGVNYSPRQQFLSKDGGITWSLLEANNANVFSNISTGTVD
ASITRFEQSDGSHFLLFTNPQGNPAGTNGRQNLGLWFSFDEGVTWKGPIQLVNGASAYSDIY
QLDSENAIVIVETDNSNMRILRMPITLLKQKLTLSQN
SEQ ID NO: 37:
TTGTCAATCAAGATGAGTTCACAACGAAGAAGAGCATCGATTCACAAGGAAACAGATTCTAA
TATAAAGGGAGTAGATATGCGTTTCAAAAACGTAAAGAAAACCGCTTTAATGCTTGCAATGT
TCGGTATGGCGACAAGCTCAAACGCCGCACTTTTTGACTATAACGCAACGGGTGACACTGAG
TTTGACAGTCCAGCCAAACAGGGATGGATGCAAGACAACACGAATAATGGCAGCGGCGTTTT
AACCAATGCAGATGGAATGCCCGCTTGGTTGGTGCAAGGTATTGGAGGGAGAGCTCAATGGA
CATATTCTCTCTCTACTAATCAACATGCCCAAGCATCAAGTTTCGGTTGGCGAATGACGACA
GAAATGAAAGTGCTCAGTGGTGGAATGATCACAAACTACTACGCCAACGGCACTCAGCGTGT
CTTACCCATCATTTCATTAGATAGCAGTGGTAACTTAGTTGTTGAGTTTGAAGGGCAAACTG
GACGCACCGTTTTGGCAACCGGCACAGCAGCAACGGAATATCATAAATTTGAATTGGTATTC
CTTCCTGGAAGTAACCCATCCGCTAGCTTTTACTTCGATGGCAAACTCATTCGTGACAACAT
CCAGCCGACTGCATCAAAACAAAATATGATCGTATGGGGGAATGGCTCATCAAATACGGATG
GTGTCGCCGCTTATCGTGATATTAAGTTTGAAATTCAAGGCGACGTCATCTTCAGAGGCCCA
GACCGTATACCGTCCATTGTAGCAAGTAGCGTAACACCAGGGGTGGTAACCGCATTTGCAGA
GAAACGTGTGGGGGGAGGAGATCCCGGTGCTCTGAGTAATACCAATGACATAATCACTCGTA
CCTCACGAGATGGCGGTATAACTTGGGATACCGAGCTCAACCTCACTGAGCAAATCAATGTC
AGTGATGAGTTTGATTTCTCCGATCCTCGGCCTATCTATGATCCTTCCTCCAATACGGTTCT
TGTCTCTTATGCTCGATGGCCGACCGATGCCGCTCAAAACGGAGATCGAATAAAACCATGGA
TGCCAAACGGTATTTTTTACAGCGTCTATGATGTTGCATCAGGGAACTGGCAAGCGCCTATC
GATGTTACCGATCAGGTGAAAGAACGCAGTTTCCAAATCGCTGGTTGGGGTGGTTCAGAGCT
GTATCGCCGAAATACCAGCCTAAATAGCCAGCAAGACTGGCAATCAAACGCTAAGATCCGAA
TTGTTGATGGTGCAGCGAACCAGATACAAGTTGCCGATGGTAGCCGAAAATATGTTGTCACA
CTGAGTATTGATGAATCAGGTGGTCTAGTCGCTAATCTAAACGGTGTTAGTGCTCCGATTAT
CCTGCAATCTGAACACGCAAAGGTACACTCTTTCCATGACTACGAACTTCAATATTCGGCGT
TAAACCACACCACAACGTTATTCGTGGATGGTCAGCAAATCACAACTTGGGCTGGCGAAGTA
TCGCAGGAGAACAACATTCAGTTTGGTAATGCGGATGCCCAAATTGACGGCAGACTGCATGT
GCAAAAAATTGTTCTCACACAGCAAGGCCATAACCTCGTGGAGTTTGATGCTTTCTATTTAG
CACAGCAAACCCCTGAAGTAGAGAAAGACCTTGAAAAGCTTGGTTGGACAAAAATTAAAACG
GGCAACACCATGAGTTTGTATGGAAATGCCAGTGTCAACCCAGGACCGGGTCATGGCATCAC
CCTTACTCGACAACAAAATATCAGTGGCAGCCAAAACGGCCGCTTGATCTACCCAGCGATTG
TGCTTGATCGTTTCTTCTTGAACGTCATGTCTATTTACAGTGATGATGGCGGTTCAAACTGG
CAAACCGGTTCAACACTCCCTATCCCCTTTCGCTGGAAGAGTTCGAGTATCCTAGAAACTCT
CGAACCTAGTGAAGCTGATATGGTTGAACTCCAAAACGGTGATCTACTCCTTACTGCACGCC
TTGATTTTAACCAAATCGTTAATGGTGTGAACTATAGCCCACGCCAGCAATTTTTGAGTAAA
GATGGTGGAATCACGTGGAGCCTACTTGAGGCTAACAACGCTAACGTCTTTAGCAATATCAG
TACTGGTACCGTTGATGCTTCTATTACTCGGTTCGAGCAAAGTGACGGTAGCCATTTCTTAC
TCTTTACTAACCCACAAGGAAACCCTGCGGGGACAAATGGCAGGCAAAATCTAGGCTTATGG
TTTAGCTTCGATGAAGGGGTGACATGGAAAGGACCAATTCAACTTGTTAATGGTGCATCGGC
ATATTCTGATATTTATCAATTGGATTCGGAAAATGCGATTGTCATTGTTGAAACGGATAATT
CAAATATGCGAATTCTTCGTATGCCTATCACATTGCTAAAACAGAAGCTGACCTTATCGCAA
AACTAA
SEQ ID NO: 38:
MVGADPTRPRGPLSYWAGRRGQGLAAIFLLLVSAAESEARAEDDFSLVQPLVTMEQLLWVSG
KQIGSVDTFRIPLITATPRGTLLAFAEARKKSASDEGAKFIAMRRSTDQGSTWSSTAFIVDD
GEASDGLNLGAVVNDVDTGIVFLIYTLCAHKVNCQVASTMLVWSKDDGISWSPPRNLSVDIG
TEMFAPGPGSGIQKQREPGKGRLIVCGHGTLERDGVFCLLSDDHGASWHYGTGVSGIPFGQP
KHDHDFNPDECQPYELPDGSVIINARNQNNYHCRCRIVLRSYDACDTLRPRDVTFDPELVDP
VVAAGALATSSGIVFFSNPAHPEFRVNLTLRWSFSNGTSWLKERVQVWPGPSGYSSLTALEN
STDGKKQPPQLFVLYEKGLNRYTESISMVKISVYGTL
SEQ ID NO: 39:
MTVQPSPWFSDLRPMATCPVLQKETLFRTGVHAYRIPALLYLKKQKTLLAFAEKRASKTDEH
AELIVLRRGSYNEATNRVKWQPEEVVTQAQLEGHRSMNPCPLYDKQTKTLFLFFIAVPGRVS
EHHQLHTKVNVTRLCCVSSTDHGRTWSPIQDLTETTIGSTHQEVVATFAVGPGHCLQLRNPAG
SLLVPAYAYRKLHPAQKPTPFAFCFISLDHGHTWKLGNFVAENSLECQVAEVGTGAQRMVYL
NARSFLGARVQAQSPNDGLDFQDNRVVSKLVEPPHGCHGSWAFHNPISKPHALDTWLLYTH
PTDSRNRTNLGVYLNQMPLDPTAWSEPTLLAMGICAYSDLQNMGQGPDGSPQFGCLYESGNY
EEIIELIFTLKQAFPTVFDAQ
SEQ ID NO: 40:
MEEVPPYSLSSTLFQQEEQSGVTYRIPALLYLPPTHTFLAFAEKRTSVRDEDAACLVLRRGL
MKGRSVQWGPQRLLMEATLPGHRTMNPCPVWEKNTGRVYLFFICVRGHVTERCQIVWGKNAA
RLCFLCSEDAGCSWGEVKDLTEEVIGSEVKRWATFAVGPGHGIQLHSGRLIIPAYAYYVSRW
FLCFACSVKPHSLMIYSDDFGVTWHHGKFIEPQVTGECQVAEVAGTAGNPVLYCSARTPSRF
RAEAFSTDSGGCFQKPTLNPQLHEPRTGCQGSVVSFRPLKMPNTYQDSIGKGAPATQKCPLL
DSPLEVEKGAETPSATWLLYSHPTSKRKRINLGIYYNRNPLEVNCWSRPWILNRGPSGYSDL
AVVEEQDLVACLFECGEKNEYERIDFCLFSDHEVLSCEDCTSPSSD
SEQ ID NO: 41:
METAGAPFCFHVDSLVPCSYWKVMGPTRVPRRTVLFQRERTGLTYRVPALLCVPPRPTLLAF
AEQRLSPDDSHAHRLVLRRGTLTRGSVRWGTLSVLETAVLEEHRSMNPCPVLDEHSGTIFLF
FIAVLGHTPEAVQIATGKNAARLCCVTSCDAGLTWGSVRDLTEEAIGAALQDWATFAVGPGH
GVQLRSGRLLVPAYTYHVDRRECFGKICWTSPHSLAFYSDDHGISWHCGGLVPNLRSGECQL
AAVDGDFLYCNARSPLGNRVQALSADEGTSFLPGELVPTLAETARGCQGSIVGFLAPPSIEP
QDDRVVTGSPRNTPHSPCFNLRVQESSGEGARGLLERWMPRLPLCYPQSRSPENHGLEPGSDG
DKTSWTPECPMSSDSMLQSPTWLLYSHPAGRRARLHMGIYLSRSPLDPHSWTEPWVIYEGPS
GYSDLAFLGPMPGASLVFACLFESGTRTSYEDISFCLFSLADVLENVPTGLEMLSLRDKAQG
HCWPS
SEQ ID NO: 42:
GGGTCACATGCTGATGGACTAATTGGAGTCGCGGCAGCGCGGGCTGCGGCCCCCAAGGGGAG
GGGTCGGAGTGACGTGCGCGCTTTTAAAGGGCCGAGGTCAGCTGACGGCTTGCCACCGGTGA
CCAGTTCCTGGACAGGGATCGCCGGGAGCTATGGTGGGGGCAGACCCGACCAGACCCCGGGG
ACCGCTGAGCTATTGGGCGGGCCGTCGGGGTCAGGGGCTCGCAGCGATCTTCCTGCTCCTGG
TGTCCGCGGCGGAATCCGAGGCCAGGGCAGAGGATGACTTCAGCCTGGTGCAGCCGCTGGTG
ACCATGGAGCAGCTGCTGTGGGTGAGCGGGAAGCAGATCGGCTCTGTAGACACTTTCCGCAT
CCCGCTCATCACAGCCACCCCTCGGGGCACGCTCCTGGCCTTCGCTGAGGCCAGGAAAAAAT
CTGCATCCGATGAGGGGGCCAAGTTCATCGCCATGAGGAGGTCCACGGACCAGGGTAGCACG
TGGTCCTCTACAGCCTTCATCGTAGACGATGGGGAGGCCTCCGATGGCCTGAACCTGGGCGC
TGTGGTGAACGATGTAGACACAGGGATAGTGTTCCTTATCTATACCCTCTGTGCTCACAAGG
TCAACTGCCAGGTGGCCTCTACCATGTTGGTTTGGAGTAAGGACGACGGCATTTCCTGGAGC
CCACCCCGGAATCTCTCTGTGGATATTGGCACAGAGATGTTTGCCCCTGGACCTGGCTCAGG
CATTCAGAAACAGCGGGAGCCTGGGAAGGGCCGGCTCATTGTGTGTGGACACGGGACGCTGG
AGCGAGATGGGGTCTTCTGTCTCCTCAGTGATGACCACGGTGCCTCCTGGCACTACGGCACT
GGAGTGAGCGGCATTCCCTTTGGCCAGCCCAAACACGATCACGATTTCAACCCCGACGAGTG
CCAGCCCTACGAGCTTCCAGATGGCTCGGTCATCATCAACGCCCGGAACCAGAATAACTACC
ATTGCCGCTGCAGGATCGTCCTCCGCAGCTATGACGCCTGTGACACCCTCAGGCCCCGGGAT
GTGACCTTCGACCCTGAGCTCGTGGACCCTGTGGTAGCTGCAGGAGCACTAGCCACCAGCTC
CGGCATTGTCTTCTTCTCCAATCCAGCCCACCCTGAGTTCCGAGTGAACCTGACCCTGCGCT
GGAGTTTCAGCAATGGTACATCCTGGCAGAAGGAGAGGGTCCAGGTGTGGCCGGGACCCAGC
GGCTACTCGTCCCTGACAGCCCTGGAAAACAGCACGGATGGAAAGAAGCAGCCCCCGCAGCT
GTTCGTTCTGTACGAGAAAGGCCTGAACCGGTACACCGAGAGCATCTCCATGGTCAAAATCA
GCGTCTACGGCACGCTCTGAGCCCCGTGCCCAAAGGACACCAAGTCCTGGTCGCTGACTTCA
CAGCTCTCTGGACCATCTGCAGAGGGTGCCTGAAACACAGCTCTTCCTCTGAACTCTGACCT
TTTGCAACTTCTCATCAACAGGGAAGTCTCTTCGTTATGACTTAACACCCAGCTTCCTCTCG
GGGCAGGAAGTCCCTCCGTCACCAAGAGCACTTTTTTCCAGTATGCTGGGGATGGCCCCTGT
CCATTCTCTTCCAGGACAACGGAGCTGTGCCTTTCTGGGACAGGATGGGGGAGGGGCTCCCC
CTGGAGAGATGAACAGATACGAACTCAGGGAACTGAGAAGGCCCGGTGTCCTAGGGTACAAA
GGCAGGTACTAGATGTGATTGCTGAAAGTCCCCAGGGCAGAGTGTCCTTTCAGAGCAAGGAT
AAGCACACCTACGTGTGCACCTTTGATTATTTATGAATCGAAATATTTGTAACTTAAAATTT
TTGATGCAGAAAAAGCGTTTGTGGAGTCTGTGGTTCTGTCTGCTCACGCCTTCCCAATTGCC
TCCTGGAGAGACAGGAAGGCAGCTGGAAGAGGAGCCGATGTACTTACTGGGAAGCAGAAACC
CCTAGATTCCATCCTGGCTGCTGCTGTTTGCAAGTGTCAAAGATGGGGGGGCGTGTTTATAT
TTTATATTTCTAAGATGGGGTGGCATAGGAAATAGGGAACAGATGTGTAAAACCAGATGGGA
AGGACAGTCTGTGAGAAAGGAGCAAGCAGTTGCTGCAGGTGTGGGAGAGCAAAGCCCTTCTC
CACGTGGAAAGAGCCCAGATGGACGCTAAGCATGTTGGGCACCTGTAACCCCGCACTCGCTG
GACTGACGGTGTAGCTCAGTGGTGGAGCTAGTACTTGGAACGCCTAAGACTCTGGGTTCAGT
CCTTGGGGGGGGGGGTATGTGTTTATTGAGAGGAAGGTGTACGTACTGTAGGTCAGAGGACA
GCTTACTGGAGTTGTCTCTCTCCTTCACGCTGTGAGTCCTGTGGAATGACCTCAGGTGTCAG
AGTTGGGGGCAGGTGCCTTTGCCAGCTGAGCCATCTTGCTGTCTCTGCTTTAATTTAAAAAA
AAAAAAAAAAAAGAATATTAAGGTCTGAGGGATTCGGGCTGCGTTCATTTCAATTAGAGGGT
CATATTTCTTTTGACATTTCTTCTCTAAGAAATGTTAAGATCATTTGTTCTGTGTGATAGAG
GTATAGCTCCATTGTATGTCAGCAGTGAGGGATCCTGTGCATTTTATCCAGAGTTTGTACGG
TGTTCTAGGGGCTGCTAGTGCAGCCCAGTGCTAAACACTTCAGCATGCACAAGGCCTCAATC
AGTGCATGCATGTGCACACACACACAGACACACACGTAGACACTGACACAGGTACACAAATA
CACACTGGCCCACATGTACACATCGACTCACAGGTAGACAGACCCACTTTGACACACATATA
CACAGACACAAACGCACTGGCACACACATATACACAGGCACACATGGATAGATGGACACACG
TGTAGACATACACACACACACAGAAATACAAATGTTCAGGTTTTCTAAAAAAAAAAAAATTA
GAGACGTGTTGACTTCATTTTTAGCAAAAATCCTGTCATGTATCTTAAAGTGGATTGAACCC
ACTATGTAGCCCAGGCTGGCCTCCAAATGGGCATCCTTCTGCCTCAGTCTCCCGAGGGCTAG
GATAACAGGAGTATGCCATCACACCTGGCTAATAGAAATTTTCAAAATTGTTTGTTTGAAGG
TGACTCTTACTATATTGCCTAACTGATCTCCAGTTCGTGAAATCCTCCTGCCTCAGAACCAG
GACTGTCAATATAACCCACCAAGACAGGCCAACATTCACAATTGATTGTTAGTTTGTGGTCT
GAATCAAGGTCTTATACTGTAGCCCAGGCTAGCCCGGAATACACGATATCTCCAGTGCTTCA
GATCCTCAGTTCTAACTAAGCATGGCCACATCCATGTTTAACTGCAAATTTGATGTTACCAT
GGTTTGGTTTGGTTTGGTTTGGTTTGGTTTGGTTTGGTTTGGTTTTTTGGCCATTTTTTTTT
TCTCATGCTGAGGCCTTGTGCTCTCAAGTTGGGGAGACAGCATGGAGGGTAGCTGCAACTGT
AACCCCAGTTCCAGGGGACCTGACACCCTCTGGCCTCCACAAGTATTAGGCACATCTGTGGT
GCACAGACATACAATCAGGCAAAATATTCATACACATAAAATAAAATAATTTAAAACAAAAG
CAAAAATCAGGACCTAAGAAAAAAATCTATTCCTGATTCTTTTATGTTTTGTTTGTATTTTA
TCAAGACAGGGTTGTTTCTCTGTATAGCCCTGGCTGTCTTGGAATTCACTCTGTAGACCAGG
CTGGCCTCAAACTCAGAAATCCTCCTGCCTTTGCCTTCCAAGTGCTGGAATTAAAGGCATGC
GCCACC
SEQ ID NO: 43:
GACATGACCCAAACGGCCCCTGGCTGCAAGGTAATATCGGAAGTTGACTAAGAATGGACGCC
CCACCACTGACTGACCCGCCCCCTGAGTCTGAGATTGGACTTGTCTCTGGATACAGTCATAC
TTTGAGGTACTAGAAGTTAGAAACTGTTAGGTTACTCAGTTCAGTCCATGACAGTCCAACCT
TCTCCATGGTTTTCCGATCTCAGGCCCATGGCGACCTGCCCTGTCCTGCAGAAGGAGACACT
GTTCCGCACAGGCGTCCATGCTTACAGAATCCCTGCTCTGCTCTACCTGAAGAAGCAGAAGA
CCCTGCTGGCCTTTGCGGAAAAGCGAGCCAGCAAGACGGATGAGCACGCAGAGTTGATTGTC
CTGAGAAGAGGAAGCTACAACGAAGCCACCAACCGTGTCAAGTGGCAGCCTGAGGAAGTGGT
GACCCAAGCCCAGCTGGAAGGCCACCGCTCCATGAATCCATGTCCCTTGTATGACAAGCAAA
CAAAGACCCTCTTCCTTTTCTTCATCGCTGTCCCTGGGCGTGTATCAGAACATCATCAGCTC
CACACTAAGGTTAATGTCACACGGCTGTGCTGTGTCAGCAGCACTGACCATGGGAGGACCTG
GAGCCCCATCCAGGACCTCACAGAGACCACCATTGGCAGCACTCATCAGGAATGGGCCACAT
TTGCTGTGGGTCCTGGGCATTGTCTGCAGCTGCGGAACCCAGCTGGGAGCCTGCTGGTACCT
GCTTATGCCTACCGGAAACTGCACCCTGCTCAGAAGCCTACCCCCTTTGCCTTCTGCTTCAT
CAGCCTTGACCATGGGCACACATGGAAACTAGGCAACTTTGTGGCTGAAAACTCACTGGAGT
GCCAGGTGGCTGAGGTTGGCACTGGAGCTCAGAGGATGGTATATCTCAATGCTAGGAGCTTC
CTGGGAGCCAGGGTCCAGGCACAAAGTCCTAATGATGGTCTGGATTTCCAGGACAACCGGGT
AGTGAGTAAGCTTGTAGAGCCCCCCCACGGGTGTCATGGAAGTGTGGTTGCCTTCCACAACC
CCATCTCTAAGCCACATGCCTTAGACACATGGCTTCTTTATACACACCCTACAGACTCCAGG
AATAGAACCAACCTGGGTGTGTACCTAAACCAGATGCCACTAGATCCCACAGCCTGGTCAGA
GCCCACCCTGCTGGCCATGGGCATCTGTGCCTACTCAGACTTACAGAACATGGGGCAAGGCC
CTGATGGCTCCCCACAGTTTGGGTGTCTGTATGAATCAGGTAACTATGAAGAGATCATTTTC
CTCATATTCACCCTGAAGCAAGCTTTCCCCACTGTATTTGATGCCCAGTGATCTCAGTGCAC
GTGGCCCAAAGGGCTTCCTTGTGCTTCAAAACACCCATCTCTCTTTGCTTCCAGCATCCTCT
GGACTCTTGAGTCCAGCTCTTGGGTAACTTCCTCAGGAGGATGCAGAGAATTTGGTCTCTTG
ACTCTCTGCAGGCCTTATTGTTTCAGCCTCTGGTTCTCTTTTCAGCCCAGAAATCAAAGGAG
CCTGGCTTTCCTCAGCCTGTTGGCAGGGCAGGTGGGGACAGTATATATAGAGGCTGCCATTC
TGCATGTCGGTTGTCACTATGCTAGTTTAACCTGCCTGTTTCCCCATGCCTAGTGTTTGAAT
GAGTATTAATAAAATATCCAACCCAGCCCATTTCTTCCTGGAAAAAAA
SEQ ID NO: 44:
ACTGCGCGGTGAAGGGGCGTGGCCTGGCCGGGGAGGTTGACACCCAGACGCTGCTCTCAGTC
CTCTGGCGCCTGCTCCCCAGCGCATTCCTTCTGCTCCTGGGATATTTGTCTCATTACTGCCA
GTTCTTGCGCAGCGGTCACTGGGTTCGTTTCAGCGTCTGTGGTTTCTGTCGCTGTTATCCAG
TCTCCATCGCCCCAGCTCAGCTTCAGGCCTTCTTCCGAGACTCCACGGGAGAGCCCAGAGAG
CCTCCGGAGCCGAAGCCATGGAGGAAGTCCCACCCTACTCCCTCAGCAGCACCCTGTTCCAG
CAGGAAGAACAGAGTGGGGTGACCTACCGGATCCCAGCCCTGCTGTACCTTCCTCCCACCCA
CACCTTCCTGGCCTTTGCAGAGAAGCGGACCTCAGTCAGAGATGAGGATGCTGCCTGCCTGG
TGCTCAGACGAGGGCTGATGAAGGGGCGCTCTGTACAGTGGGGCCCCCAACGGCTACTGATG
GAGGCCACATTACCTGGGCATCGCACCATGAACCCCTGCCCTGTGTGGGAGAAAAATACTGG
CCGTGTGTACCTGTTTTTCATCTGTGTGCGGGGCCATGTTACTGAGAGGTGCCAGATTGTGT
GGGGCAAAAATGCCGCCCGTCTCTGCTTCCTTTGCAGTGAAGATGCCGGCTGCTCTTGGGGT
GAAGTGAAAGACTTGACCGAGGAGGTCATTGGCTCAGAGGTGAAGCGCTGGGCCACATTTGC
TGTGGGCCCAGGTCATGGCATCCAGCTACACTCGGGAAGGCTGATCATCCCCGCCTATGCCT
ACTATGTCTCACGTTGGTTTCTCTGCTTTGCGTGTTCAGTCAAGCCCCATTCCCTGATGATC
TACAGTGATGACTTTGGAGTCACATGGCACCATGGCAAGTTCATTGAGCCCCAGGTGACAGG
GGAGTGCCAAGTGGCCGAAGTGGCTGGGACGGCTGGTAACCCTGTGCTCACTGCAGTGCCCG
AACACCAAGCCGATTTCGAGCAGAGGCTTTTAGTACTGATAGTGGTGGCTGCTTTCAGAAGC
CAACCCTGAACCCACAACTCCATGAGCCTCGAACCGGCTGCCAAGGTAGTGTAGTGAGCTTC
CGGCCTTTGAAGATGCCAAATACCTATCAAGACTCAATTGGCAAAGGTGCTCCCGCTACTCA
GAAGTGCCCTCTGCTGGACAGTCCTCTGGAGGTGGAGAAAGGAGCTGAAACACCATCAGCAA
CATGGCTCTTGTACTCACATCCAACTAGCAAGAGGAAGAGGATTAACCTAGGCATCTACTAC
AACCGGAACCCCTTGGAGGTGAACTGCTGGTCCCGCCCGTGGATCTTGAACCGTGGGCCCAG
TGGCTACTCTGATCTGGCTGTTGTGGAAGAACAGGACTTGGTGGCGTGTTTGTTTGAGTGTG
GGGAGAAGAATGAGTATGAGCGGATTGACTTCTGTCTGTTTTCAGACCATGAGGTCCTGAGC
TGTGAAGACTGTACCAGCCCTAGTAGCGACTAAAGCCAAATCAAGACGGATGAGTGAGGCCC
AGCTTCCCACAGAAAGGAATGGCAGCTACAGCCAGGGTAACAGAGGTCTCTGATGTCTAGAG
AAAACTCTAAAAACTAATAATCTGCTCCTTGAATTTTTTCACTTTTCCCTTCAATGAGCATG
GTGAAAATTGTGCCATATCTTACATAACGAGGCTCTTGAACTGGGAGTTTGAATCTCTTCTC
TTCCCATTAAAAGGAGAGGCCATGTGCTCGCTTCGCGTTCGACAAAGCCTGGATTCTGATCT
TGAGTGGAAGCCACAGGCTTGTCTTTTCCAATGGTTCACTGCTCACCTGAGTATTAGGTGAT
GTGTAGGTGCCTTGGCCAGAAGAAAGATCTGTGTTGTTGTATTTTTTTAAATTTATTTATTT
ACTATATGTAAGTAGACTGCAGCTGTCTTCAGACACACCAGAAGAGGGCGTCAGATCTCATT
AGAGATGGTTGTGAGCCACCATGTGGTTGCTGGGATTTGAACTCAGGACCTTCAGAAGAGCA
GTCAGTGCTCTTAACTACTGAGCCATCTCTCAAGCCCCGCATTGCTGTATTTTTAATAAGAA
AAATGCCCTTATCCTTCCAATAATGCCTGGAGCTGTACAAATTCTCTGTCTTAGAAGACTTG
AGAAAGCAGAACTGTAAGGTCAGATGCTTTCTCCAGCCTTGATGCTGTGTTCCACCTTCCCT
TCCTCATCCAGAAAACAGTTACTAGGGAGAAAATGAGAAACCCATGCCAGCTGCCCTTGATG
ATGGTTGATAACGGTGCTTATTGCTTTTGATGTCATTACCTCTGTTAGAGATGAATCAGAGT
CAGAGGTCCTTAGCTGCATCCACCCATTTCCAGGGGGACATTCTAACACTGCTGAACAGTCA
GCTAAAATGAGAGCTGTGTGTCCTAGCCTGATTCCAGGTTAGTCATGATGCTTCCTGGAGCT
GGGCTTTTATCTAATCCCAGGAGCCATCTAGGGGAGGCTCAGAGCTAGCAGGTGATCTTCCT
GAGATGGTTTCACCGTGACAGGTGAACCATGAGCCCTTCCAAGCAAGGCCAAAGGACAACAT
TATAGGAAAGATTTCTAGTATTAATATGCCTTTTCTCTGTGTGTGTACTGTCTTGTAGTGAT
GCTATATAGACAAATAGATGATTTCTTATTTTTTGTTTGTTTGTTTGTTTTTTTGTTTTTCT
GTAGCCCTAGCTGTCCTGGAACTCACTTTGTAAACCAGGCTGGCCTCGATCTCAGAAATCCG
CCTGCCTCTGCCTCCCGAGTGCTGGGATTAAAGGTGTGCACCACCACACCTTAATGATGATC
CTATAAGTATTCCTAAAATTATACTAGTAATTATTAACTCCTTTATAATAGGACTGCTATTA
AAGCCCTCGCTGATATGAAAACTAGAGTGAGAACTCTGCGAGTCTTCACATGTCATAATTAC
TTCTGAGATAGAAAGCAGGCATTTACAACTTAGAACACATTTCTTAGAGCTGTAAAACAATT
AACTAGAGGTCATAAAAGGGAATGAAAGATTTATTGTAGGTGCTAGGACAGAACATAAAATA
TTGACTGGGCTTATCTATATGAAACTTCATTGTTAACTTTTACACAAGAATTATGGTTTTTA
ACTTTCAGTGAACCTGCGGAGCTAGTGACAGAAGAGAAATGTCTAGTTAGATAACTACTCTT
AATGGAAATTCACATAAACATCTGTTGCCATCTTCTTTTTGAATTTATGTTTAAACTTGTGA
ATGTTTGAATTAGACACTACGCGAGCACATAGAAAATAAAGAACTAAGCGTGAA
SEQ ID NO: 45:
GGACAGTGTGCATCACGGAGCTTGTGGCCCAGACTGTGCCTGGCAGACCCAGAGGACCTAAG
GCTTGGCTCTAGTGGTGGTCAGCACAGCCCTCGGTGGTCTGCGGAGCCTGATATTGCTTTAC
GTAAGGGCTGTTCTGCTGTGCATCTCCTGTGTCTGAAGCTATTCGCCATGGAGACTGCTGGA
GCTCCCTTCTGCTTCCATGTGGACTCCCTGGTACCTTGCTCCTACTGGAAGGTTATGGGGCC
CACGCGTGTTCCCAGGAGAACGGTGCTCTTCCAGAGGGAAAGGACGGGCCTGACCTACCGTG
TGCCTGCGTTACTCTGTGTGCCTCCCAGGCCTACTCTGCTGGCCTTCGCGGAACAGCGACTT
AGCCCTGATGACTCCCATGCCCACCGCCTGGTGCTACGGAGGGGCACGCTGACCAGGGGCTC
AGTGCGGTGGGGCACTCTGAGTGTACTGGAGACTGCAGTACTGGAGGAGCACAGGTCTATGA
ACCCTTGCCCGGTGCTGGATGAGCACTCTGGTACCATCTTCCTCTTCTTCATTGCCGTGCTG
GGCCACACACCGGAGGCCGTGCAAATCGCCACTGGCAAGAACGCTGCTCGCCTCTGCTGTGT
GACCAGCTGTGACGCTGGCCTCACCTGGGGCAGTGTTCGAGATCTCACTGAGGAAGCCATTG
GTGCTGCATTGCAGGACTGGGCCACCTTTGCTGTGGGTCCGGGCCATGGAGTTCAGCTGCGC
TCGGGTCGCCTGCTTGTTCCTGCTTACACCTATCATGTGGACCGACGGGAATGTTTTGGCAA
GATCTGCTGGACCAGTCCCCACTCCTTGGCATTCTACAGTGATGATCATGGGATCTCCTGGC
ATTGTGGAGGCCTTGTGCCCAACCTACGCTCTGGAGAGTGCCAACTGGCTGCGGTAGATGGA
GACTTTCTCTACTGTAATGCTCGAAGCCCTCTGGGTAACCGTGTGCAGGCACTGAGTGCTGA
TGAAGGCACGTCCTTCCTACCAGGGGAGCTGGTGCCTACATTGGCAGAGACGGCTCGTGGTT
GCCAGGGTAGCATTGTGGGCTTCCTAGCTCCACCCTCAATCGAGCCTCAGGATGACCGGTGG
ACAGGGAGTCCTAGGAACACCCCACATTCCCCATGCTTCAATCTCAGAGTACAGGAGTCTTC
GGGGGAAGGTGCCAGAGGTCTTCTTGAACGTTGGATGCCCAGGTTGCCTCTCTGCTACCCAC
AGTCCCGGAGCCCAGAGAATCATGGCCTAGAGCCTGGGTCAGATGGAGATAAGACATCCTGG
ACTCCGGAATGTCCTATGTCCTCTGATTCCATGCTTCAGAGCCCCACATGGCTACTATATTC
CCACCCAGCAGGGCGTAGAGCTCGGCTCCACATGGGAATCTACCTGAGCCGATCCCCCTTGG
ATCCCCACAGCTGGACAGAGCCCTGGGTGATCTATGAGGGCCCCAGTGGCTACTCTGACCTT
GCCTTTCTTGGGCCTATGCCTGGGGCATCCCTGGTTTTTGCCTGTCTGTTTGAGAGCGGGAC
CAGGACTTCCTATGAAGACATTTCTTTTTGCTTGTTCTCACTGGCGGATGTCCTGGAGAATG
TGCCCACTGGCTTAGAGATGCTAAGTCTCAGGGATAAGGCTCAGGGGCATTGCTGGCCCTCT
TGATGGCCTCACCCTCTCGTAGCCGCCTGGAGAGGAAGGGTAGACTATATAGAGGAGGTTAG
GGGTAGGTCAGCATGATGCTAGGATGGAGAGAGCTCTGTCCCCTCGTGGATGGTGGTGGTGA
CTCACCCGGGGGGCCAGCTGCTTTCTGAGTGCAAATGAGAAAAATAAAGAGCTGCGCTGTGA
CTTTTCTTTCCACATCAAAGCTTGGGTGTCAGTGCTTTAGCTTGATGCTCTGATCACCATGC
AAATCTTCCACCGGCGCCTTGCTCAGCTTTCATATCCCAAGGGTGCCTGGGAGGAAGGCAAC
AGGGACAGTGGACATCACTGCACCACTTTCCACGACCCTGTGTGCCAACCTCAGCCACTTTG
AAACATGCTGATGACTGAGGTCTGTTCACTTTCTTAATTTCAAGCAGGAGAAGCAGGTTGGG
GAGCCAGCCTCCCCAGCTAGAGGGGACAGAACTTGACTTGAGCAGGGGGGTACCTCCTAGGA
CCTGCTCCATGTGCCTACTTCTTTACCCTTCTCTAGAGAGGGCTCTTGTCCTGTCAGAGCTG
TTTTCTCCCTTCTCTTGTTTTTTCTTTTTCAAGACTGTTTCTCTGTGTTAGCCCTGGCTGTC
CTGGATCTCACTCTGTAGATCAGGCTGACCTTGAGTTCAAAGCTCCATCTGCCTCTACTTCT
CACATTACTGTGATTAAAGGCATATACTACCACTGCCTGGTGCCCTTTTGTATTTCTTATTA
AAGTCCTAATGTCTGATTATAAAAACAGTCTGTGTGGGCTGGAGTGATGGCTTACTCAGTAA
AGCACTTGCCATGGAATCTGGGCAATCTGAGTTTCATTTTTAGCATCCTGTAAAAATCCCAA
TTTGATGGTGTACTTGTAATGTCAGCATGGAGAGGCAGAGATAGGTAAGTTCCCCAAGACTC
TTTGAACCGACAGCTTGGCCTCACTGGCACATTCCAGGTCTCAGTGAGAGACCCTGCCTCAA
AATACAAAGAAAGAGCTGCTGAAGAGTGGGTCAGAGTTGACCTCTGATCTCCGGAAGTATAT
GATACACACCCGTGCATGCACTCTTCCTTACAAAATAAAAAGCAAAACAAAACCCCAACAGG
TATATGGCCATTTTAGAAAAATTAGAAGATTTAGAAAGCTATACATAAAAAAAAATGACCTA
AAGAAAAATCTTTACTGTTCTGGGCACTATCCCTATCAAACCACTGTGTTCTTTGGCCAAGC
CTTGGGGTGGACACTGTTTTGAGGTGGGTCCTGTTATCTCCACTAGGTAGTGGAGTTTTGTG
TCAGACTAACTGGGTCTTAAAGCTGTCTTTAAGGCCATCAGGAGCTACTGACTTGCCTGCCT
CAGCAGAGCATATCCTGAAGGTCGGGGTTAAGTCTCCTTCCCGAGCGAGTTGCCTTCCAGTG
GGCCCCTGGACTCCTAGGTCCTCAGCGCTCATCAGCTGCCAAGGACTCTGAGGGAATGTCCT
CTGACTGTGGCCCCGAAAGGTAGGGGAGGGGGATGTGCTTAGGCTTAGGACAGGGTCCTGTT
TCAGTCTGCCTTCACTGTTAGTAGCACTGTGCCACATGGCACAGACTGGGCGAGCTTTAAAG
GAAGGAGGTTGATATTGGTTCCCACTTCTGGGGATCATGGTTGAGCAGCCTTGTCTGATGAT
GGTTGTCTTGATGGTAGATCGTGAGGTAGTTGATGAAGGTATGACATGGTGAGAAACTCTGT
GTGTGTGTGTTATTTTCTCTGTGTTCTACCTATACATCTATCTATGTATATATGTATCTATC
TATCTACCTGGAGGCTGGAGAGATAGCTTAGTGGTTAAGAACATTTGTTGTTCTTGCATAGT
CCTGGATTTAAATTTTCAGCACCCACATGGCAGCTCACAACAACCCATAAATCCAGTTTCAG
AGGATCCAACCTCTGATATACCATGTCAGCCAGAGCAGACACGGCTGAAGGTGGTTTGATCC
CCGTATGGAGAGGTGACAATTGGGAAGAGAGAAAGATCAACTTAACCATGCAAGGAACAGGA
AGTTAAATACTGAACAGGGAAGGTAAAGGCAGGAAGTAGATGTAGAGGGCAAATCAATGAAA
CCCAAACATACCCAAATTACGCTAAACACACACTGACATGCCAATTAAAAGGACAAATTGGC
TCCACTGGCAAAACCAAAACAGACACTGAAGATCCAAACAGTCACATGCCAACTACCGCGGA
GGGAGACAGACACAGAGAAGACCGTGACAGACACTTGGACACTCTTGAGAGTGGATGTGCAG
GAAGAGAGCTCTGCCAGTGGAGAAGAAAGCACTCAGAAGAAAGTGACAGCAGCTGTAAATTT
GTATTCTGCTAATGTTATGTTCCAAAGTTGAAAGCAAAATTGTACCAATTCATAAGAACAAA
CAGGCTGACTCTCAGTTGTGACTGAACGTCTCTCAGTAACTGACGGGGCGAGCAGGCCAAAG
GAGAGTCGGCTCAGAAGGGTGCATAGCCACGCCAAATCAAATAAGCAAGTACAACCGGCAGG
CTCTATTTCTAGCACAAAGGGGTCTGTGCCTCATTCTGTGCTTGGGTCAGAGCTTGGGTCTC
TCATTTGGATGTAAGTGGTGTAGTGGAGAAGCAGGAAATAATCCGGAGCGCATATTTTGATT
TTAACATAAGTGCTGATTTGGGAGGGAGTTTTGTCAAATTGTGTTTTTACAATGTTTTTTTT
TTTTTAAATGATGCTTTTTTGTAAAGTGTACAAATGTGATATAAGATTGGTTCTGCTACATT
CAGTTTCTATAAAAGTGGTTCTAAAATATTGTACTGTCAATCATCTCATGATTATTCTACTG
TAGACATTACTGACTTTGTATGTAATAATTAATATTAGAAGAAAATATAATTTATTTGAATA
TAAAAAAAAAAAAAAAAAAA
SEQ ID NO: 46:
X₁ASLPX₂LQX₃ESVFQSGAHAYRIPALLYLPGQQSLLAFAEQRASKKDEHAELIVLRRGDYD
AX₄THQVQWQAQEVVAQARLDGHRSMNPCPLYDX₅QTGTLFLFFIAIPGQVTEQQQLQTRANV
TRLCQVTSTDHGRTWSSPRDLTDAAIGPAYREWSTFAVGPGHCLQLHDRARSLVVPAYAYRK
LHPX₆QRPIPSAFCFLSHDHGRTWARGHFVAQDTLECQVAEVETGEQRVVTLNARSHLRARV
QAQSTNDGLDFQESQLVKKLVEPPPX₇GCQGSVISFPSPRSGPGSPAQWLLYTHPTHX₈X₉QR
ADLGAYLNPRPPAPEAWSEPVLLAKGSX₁₀AYSDLQSMGTGPDGSPLFGCLYEANDYEEIX₁₁
FX₁₂MFTLKQAFPAEYLPQ
SEQ ID NO: 47:
X₁X₂SX₃X₄X₅LQX₆ESVFQSGAHAYRIPALLYLPGQQSLLAFAEQRASX₇X₈DEHAELIVX₉RR
GDYDAX₁₀THQVQWX₁₁AQEVVAQAX₁₂LDGHRSMNPCPLYDX₁₃QTGTLFLFFIAIPX₁₄X₁₅VT
EX₁₆QQLQTRANVTRLX₁₇X₁₈VTSTDHGRTWSSPRDLTDAAIGPX₁₉YREWSTFAVGPGHX₂₀LQ
LHDRX₂₁RSLVVPAYAYRKLHPX₂₂QRPIPSAFX₂₃FLSHDHGRTWARGHFVAQDTX₂₄ECQVAE
VETGEQRVVTLNARSHLRARVQAQSX₂₅NX₂₆GLDFQX₂₇SQLVKKLVEPPPX₂₈GX₂₉QGSVISF
PSPRSGPGSPAQX₃₀LLYTHPTHX₃₁X₃₂QRADLGAYLNPRPPAPEAWSEPX₃₃LLAKGSX₃₄AYS
DLQSMGTGPDGSPLFGX₃₅LYEANDYEEIX₃₆FX₃₇MFTLKQAFPAEYLPQ
SEQ ID NO: 48:
DASLPYLQKESVFQSGAHAYRIPALLYLPGQQSLLAFAEQRASKKDEHAELIVLRRGDYDAG
THQVQWQAQEVVAQARLDGHRSMNPCPLYDEQTGTLFLFFIAIPGQVTEQQQLQTRANVTRL
CQVTSTDHGRTWSSPRDLTDAAIGPAYREWSTFAVGPGHCLQLHDRARSLVVPAYAYRKLHP
KQRPIPSAFCFLSHDHGRTWARGHFVAQDTLECQVAEVETGEQRVVTLNARSHLRARVQAQS
TNDGLDFQESQLVKKLVEPPPQGCQGSVISFPSPRSGPGSPAQWLLYTHPTHSWQRADLGAY
LNPRPPAPEAWSEPVLLAKGSAAYSDLQSMGTGPDGSPLFGCLYEANDYEEIVFLMFTLKQA
FPAEYLPQ
SEQ ID NO: 49:
DASLPYLQDESVFQSGAHAYRIPALLYLPGQQSLLAFAEQRASKKDEHAELIVLRRGDYDAP
THQVQWQAQEVVAQARLDGHRSMNPCPLYDEQTGTLFLFFIAIPGQVTEQQQLQTRANVTRL
CQVTSTDHGRTWSSPRDLTDAAIGPAYREWSTFAVGPGHCLQLHDRARSLVVPAYAYRKLHP
KQRPIPSAFCFLSHDHGRTWARGHFVAQDTLECQVAEVETGEQRVVTLNARSHLRARVQAQS
TNDGLDFQESQLVKKLVEPPPQGCQGSVISFPSPRSGPGSPAQWLLYTHPTHSWQRADLGAY
LNPRPPAPEAWSEPVLLAKGSAAYSDLQSMGTGPDGSPLFGCLYEANDYEEIRFIMFTLKQA
FPAEYLPQ
SEQ ID NO: 50:
DASLPYLQKESVFQSGAHAYRIPALLYLPGQQSLLAFAEQRASKKDEHAELIVLRRGDYDAN
THQVQWQAQEVVAQARLDGHRSMNPCPLYDAQTGTLFLFFIAIPGQVTEQQQLQTRANVTRL
CQVTSTDHGRTWSSPRDLTDAAIGPAYREWSTFAVGPGHCLQLHDRARSLVVPAYAYRKLHP
KQRPIPSAFCFLSHDHGRTWARGHFVAQDTLECQVAEVETGEQRVVTLNARSHLRARVQAQS
TNDGLDFQESQLVKKLVEPPPQGCQGSVISFPSPRSGPGSPAQWLLYTHPTHSWQRADLGAY
LNPRPPAPEAWSEPVLLAKGSAAYSDLQSMGTGPDGSPLFGCLYEANDYEEIVFLMFTLKQA
FPAEYLPQ
SEQ ID NO: 51:
DASLPYLQKESVFQSGAHAYRIPALLYLPGQQSLLAFAEQRASKKDEHAELIVLRRGDYDAP
THQVQWQAQEVVAQARLDGHRSMNPCPLYDAQTGTLFLFFIAIPGQVTEQQQLQTRANVTRL
CQVTSTDHGRTWSSPRDLTDAAIGPAYREWSTFAVGPGHCLQLHDRARSLVVPAYAYRKLHP
KQRPIPSAFCFLSHDHGRTWARGHFVAQDTLECQVAEVETGEQRVVTLNARSHLRARVQAQS
TNDGLDFQESQLVKKLVEPPPAGCQGSVISFPSPRSGPGSPAQWLLYTHPTHRKQRADLGAY
LNPRPPAPEAWSEPVLLAKGSAAYSDLQSMGTGPDGSPLFGCLYEANDYEEIVFLMFTLKQA
FPAEYLPQ
SEQ ID NO: 52:
DASLPYLQKESVFQSGAHAYRIPALLYLPGQQSLLAFAEQRASKKDEHAELIVLRRGDYDAS
THQVQWQAQEVVAQARLDGHRSMNPCPLYDAQTGTLFLFFIAIPGQVTEQQQLQTRANVTRL
CQVTSTDHGRTWSSPRDLTDAAIGPAYREWSTFAVGPGHCLQLHDRARSLVVPAYAYRKLHP
KQRPIPSAFCFLSHDHGRTWARGHFVAQDTLECQVAEVETGEQRVVTLNARSHLRARVQAQS
TNDGLDFQESQLVKKLVEPPPAGCQGSVISFPSPRSGPGSPAQWLLYTHPTHRKQRADLGAY
LNPRPPAPEAWSEPVLLAKGSAAYSDLQSMGTGPDGSPLFGCLYEANDYEEIVFLMFTLKQA
FPAEYLPQ
SEQ ID NO: 53:
DASLPYLQKESVFQSGAHAYRIPALLYLPGQQSLLAFAEQRASKKDEHAELIVLRRGDYDAT
THQVQWQAQEVVAQARLDGHRSMNPCPLYDAQTGTLFLFFIAIPGQVTEQQQLQTRANVTRL
CQVTSTDHGRTWSSPRDLTDAAIGPAYREWSTFAVGPGHCLQLHDRARSLVVPAYAYRKLHP
KQRPIPSAFCFLSHDHGRTWARGHFVAQDTLECQVAEVETGEQRVVTLNARSHLRARVQAQS
TNDGLDFQESQLVKKLVEPPPAGCQGSVISFPSPRSGPGSPAQWLLYTHPTHRKQRADLGAY
LNPRPPAPEAWSEPVLLAKGSAAYSDLQSMGTGPDGSPLFGCLYEANDYEEIVFLMFTLKQA
FPAEYLPQ
SEQ ID NO: 54:
DASLPYLQKESVFQSGAHAYRIPALLYLPGQQSLLAFAEQRASKKDEHAELIVLRRGDYDAN
THQVQWQAQEVVAQARLDGHRSMNPCPLYDAQTGTLFLFFIAIPGQVTEQQQLQTRANVTRL
CQVTSTDHGRTWSSPRDLTDAAIGPAYREWSTFAVGPGHCLQLHDRARSLVVPAYAYRKLHP
KQRPIPSAFCFLSHDHGRTWARGHFVAQDTLECQVAEVETGEQRVVTLNARSHLRARVQAQS
TNDGLDFQESQLVKKLVEPPPAGCQGSVISFPSPRSGPGSPAQWLLYTHPTHRKQRADLGAY
LNPRPPAPEAWSEPVLLAKGSAAYSDLQSMGTGPDGSPLFGCLYEANDYEEIVFLMFTLKQA
FPAEYLPQ
SEQ ID NO: 55:
ASLPYLQKESVFQSGAHAYRIPALLYLPGQQSLLAFAEQRASKKDEHAELIVLRRGDYDAPT
HQVQWQAQEVVAQARLDGHRSMNPCPLYDAQTGTLFLFFIAIPGQVTEQQQLQTRANVTRLC
QVTSTDHGRTWSSPRDLTDAAIGPAYREWSTFAVGPGHCLQLHDRARSLVVPAYAYRKLHPK
QRPIPSAFCFLSHDHGRTWARGHFVAQDTLECQVAEVETGEQRVVTLNARSHLRARVQAQST
NDGLDFQESQLVKKLVEPPPQGCQGSVISFPSPRSGPGSPAQWLLYTHPTHSWQRADLGAYL
NPRPPAPEAWSEPVLLAKGSCAYSDLQSMGTGPDGSPLFGCLYEANDYEEIVFLMFTLKQAF
PAEYLPQ
SEQ ID NO: 56:
MASLPYLQKESVFQSGAHAYRIPALLYLPGQQSLLAFAEQRASKKDEHAELIVLRRGDYDAP
THQVQWQAQEVVAQARLDGHRSMNPCPLYDAQTGTLFLFFIAIPGQVTEQQQLQTRANVTRL
CQVTSTDHGRTWSSPRDLTDAAIGPAYREWSTFAVGPGHCLQLHDRARSLVVPAYAYRKLHP
KQRPIPSAFCFLSHDHGRTWARGHFVAQDTLECQVAEVETGEQRVVTLNARSHLRARVQAQS
TNDGLDFQESQLVKKLVEPPPQGCQGSVISFPSPRSGPGSPAQWLLYTHPTHSWQRADLGAY
LNPRPPAPEAWSEPVLLAKGSCAYSDLQSMGTGPDGSPLFGCLYEANDYEEIVFLMFTLKQA
FPAEYLPQ
SEQ ID NO: 57:
ASLPYLQKESVFQSGAHAYRIPALLYLPGQQSLLAFAEQRASKKDEHAELIVLRRGDYDAPT
HQVQWQAQEVVAQARLDGHRSMNPCPLYDAQTGTLFLFFIAIPGQVTEQQQLQTRANVTRLC
QVTSTDHGRTWSSPRDLTDAAIGPAYREWSTFAVGPGHCLQLHDRARSLVVPAYAYRKLHPK
QRPIPSAFCFLSHDHGRTWARGHFVAQDTLECQVAEVETGEQRVVTLNARSHLRARVQAQST
NDGLDFQESQLVKKLVEPPPQGCQGSVISFPSPRSGPGSPAQWLLYTHPTHSWQRADLGAYL
NPRPPAPEAWSEPVLLAKGSAAYSDLQSMGTGPDGSPLFGCLYEANDYEEIVFLMFTLKQAF
PAEYLPQ
SEQ ID NO: 58:
DASLPYLQKESVFQSGAHAYRIPALLYLPGQQSLLAFAEQRASKKDEHAELIVLRRGDYDAP
THQVQWQAQEVVAQARLDGHRSMNPCPLYDAQTGTLFLFFIAIPGQVTEQQQLQTRANVTRL
CQVTSTDHGRTWSSPRDLTDAAIGPAYREWSTFAVGPGHCLQLHDRARSLVVPAYAYRKLHP
KQRPIPSAFCFLSHDHGRTWARGHFVAQDTLECQVAEVETGEQRVVTLNARSHLRARVQAQS
TNDGLDFQESQLVKKLVEPPPQGCQGSVISFPSPRSGPGSPAQWLLYTHPTHSWQRADLGAY
LNPRPPAPEAWSEPVLLAKGSAAYSDLQSMGTGPDGSPLFGCLYEANDYEEIVFLMFTLKQA
FPAEYLPQ
SEQ ID NO: 59:
DASLPYLQKESVFQSGAHAYRIPALLYLPGQQSLLAFAEQRASKKDEHAELIVLRRGDYDAP
THQVQWQAQEVVAQARLDGHRSMNPCPLYDAQTGTLFLFFIAIPGQVTEQQQLQTRANVTRL
CQVTSTDHGRTWSSPRDLTDAAIGPAYREWSTFAVGPGHCLQLHDRARSLVVPAYAYRKLHP
KQRPIPSAFCFLSHDHGRTWARGHFVAQDTLECQVAEVETGEQRVVTLNARSHLRARVQAQS
TNDGLDFQESQLVKKLVEPPPQGCQGSVISFPSPRSGPGSPAQWLLYTHPTHSWQRADLGAY
LNPRPPAPEAWSEPVLLAKGSCAYSDLQSMGTGPDGSPLFGCLYEANDYEEIVFLMFTLKQA
FPAEYLPQ
SEQ ID NO: 60:
AASLPYLQKESVFQSGAHAYRIPALLYLPGQQSLLAFAEQRASKKDEHAELIVLRRGDYDAP
THQVQWQAQEVVAQARLDGHRSMNPCPLYDAQTGTLFLFFIAIPGQVTEQQQLQTRANVTRL
CQVTSTDHGRTWSSPRDLTDAAIGPAYREWSTFAVGPGHCLQLHDRARSLVVPAYAYRKLHP
KQRPIPSAFCFLSHDHGRTWARGHFVAQDTLECQVAEVETGEQRVVTLNARSHLRARVQAQS
TNDGLDFQESQLVKKLVEPPPQGCQGSVISFPSPRSGPGSPAQWLLYTHPTHSWQRADLGAY
LNPRPPAPEAWSEPVLLAKGSAAYSDLQSMGTGPDGSPLFGCLYEANDYEEIVFLMFTLKQA
FPAEYLPQ
SEQ ID NO: 61:
MASLPYLQKESVFQSGAHAYRIPALLYLPGQQSLLAFAEQRASKKDEHAELIVLRRGDYDAP
THQVQWQAQEVVAQARLDGHRSMNPCPLYDAQTGTLFLFFIAIPGQVTEQQQLQTRANVTRL
CQVTSTDHGRTWSSPRDLTDAAIGPAYREWSTFAVGPGHCLQLHDRARSLVVPAYAYRKLHP
KQRPIPSAFCFLSHDHGRTWARGHFVAQDTLECQVAEVETGEQRVVTLNARSHLRARVQAQS
TNDGLDFQESQLVKKLVEPPPQGCQGSVISFPSPRSGPGSPAQWLLYTHPTHSWQRADLGAY
LNPRPPAPEAWSEPVLLAKGSAAYSDLQSMGTGPDGSPLFGCLYEANDYEEIVFLMFTLKQA
FPAEYLPQ
SEQ ID NO: 62:
AASLPYLQKESVFQSGAHAYRIPALLYLPGQQSLLAFAEQRASKKDEHAELIVLRRGDYDAP
THQVQWQAQEVVAQARLDGHRSMNPCPLYDAQTGTLFLFFIAIPGQVTEQQQLQTRANVTRL
CQVTSTDHGRTWSSPRDLTDAAIGPAYREWSTFAVGPGHCLQLHDRARSLVVPAYAYRKLHP
KQRPIPSAFCFLSHDHGRTWARGHFVAQDTLECQVAEVETGEQRVVTLNARSHLRARVQAQS
TNDGLDFQESQLVKKLVEPPPQGCQGSVISFPSPRSGPGSPAQWLLYTHPTHSWQRADLGAY
LNPRPPAPEAWSEPVLLAKGSCAYSDLQSMGTGPDGSPLFGCLYEANDYEEIVFLMFTLKQA
FPAEYLPQ
SEQ ID NO: 63:
EVQLVESGGGLVQPGGSLRLSCAASGFNIKDTYIHWVRQAPGKGLEWVARIYPTNGYTRYAD
SVKGRFTISADTSKNTAYLQMNSLRAEDTAVYYCSRWGGDGFYAMDYWGQGTLVTVSSASTK
GPSVFPLAPSSKSTSGGTAALGCLVKDYFPEPVTVSWNSGALTSGVHTFPAVLQSSGLYSLS
SVVTVPSSSLGTQTYICNVNHKPSNTKVDKKVEPKSCDKTHTCPPCPAPELLGGPSVFLFPP
KPKDTLMISRTPEVTCVVVDVSHEDPEVKFNWYVDGVEVHNAKTKPREEQYNSTYRVVSVLT
VLHQDWLNGKEYKCKVSNKALPAPIEKTISKAKGQPREPQVYTLPPSREEMTKNQVSLYCLV
KGFYPSDIAVEWESNGQPENNYKTTPPVLDSDGSFFLYSKLTVDKSRWQQGNVFSCSVMHEA
LHNHYTQKSLSLSPGK
SEQ ID NO: 64:
DIQMTQSPSSLSASVGDRVTITCRASQDVNTAVAWYQQKPGKAPKLLIYSASFLYSGVPSRF
SGSRSGTDFTLTISSLQPEDFATYYCQQHYTTPPTFGQGTKVEIKRTVAAPSVFIFPPSDEQ
LKSGTASVVCLLNNFYPREAKVQWKVDNALQSGNSQESVTEQDSKDSTYSLSSTLTLSKADY
EKHKVYACEVTHQGLSSPVTKSFNRGEC
SEQ ID NO: 65:
EVQLVESGGGLVQPGGSLRLSCAASGFNIKDTYIHWVRQAPGKGLEWVARIYPTNGYTRYAD
SVKGRFTISADTSKNTAYLQMNSLRAEDTAVYYCSRWGGDGFYAMDYWGQGTLVTVSSGGGG
SGGGGSGGGGSDIQMTQSPSSLSASVGDRVTITCRASQDVNTAVAWYQQKPGKAPKLLIYSA
SFLYSGVPSRFSGSRSGTDFTLTISSLQPEDFATYYCQQHYTTPPTFGQGTKVEIK
SEQ ID NO: 66:
DIQMTQSPSSLSASVGDRVTITCRASQDVNTAVAWYQQKPGKAPKLLIYSASFLYSGVPSRF
SGSRSGTDFTLTISSLQPEDFATYYCQQHYTTPPTFGQGTKVEIKRTVAAPSVFIFPPSDEQ
LKSGTASVVCLLNNFYPREAKVQWKVDNALQSGNSQESVTEQDSKDSTYSLSSTLTLSKADY
EKHKVYACEVTHQGLSSPVTKSFNRGEC
SEQ ID NO: 67:
EVQLVESGGGLVQPGGSLRLSCAASGFNIKDTYIHWVRQAPGKGLEWVARIYPTNGYTRYAD
SVKGRFTISADTSKNTAYLQMNSLRAEDTAVYYCSRWGGDGFYAMDYWGQGTLVTVSSASTK
GPSVFPLAPSSKSTSGGTAALGCLVKDYFPEPVTVSWNSGALTSGVHTFPAVLQSSGLYSLS
SVVTVPSSSLGTQTYICNVNHKPSNTKVDKKVEPKSCDKTHTCPPCPAPELLGGPSVFLFPP
KPKDTLMISRTPEVTCVVVDVSHEDPEVKFNWYVDGVEVHNAKTKPREEQYNSTYRVVSVLT
VLHQDWLNGKEYKCKVSNKALPAPIEKTISKAKGQPREPQVYTLPPSREEMTKNQVSLYCLV
KGFYPSDIAVEWESNGQPENNYKTTPPVLDSDGSFFLYSKLTVDKSRWQQGNVFSCSVMHEA
LHNHYTQKSLSLSPGK
SEQ ID NO: 68:
DASLPYLQKESVFQSGAHAYRIPALLYLPGQQSLLAFAEQRASKKDEHAELIVLRRGDYDAG
THQVQWQAQEVVAQARLDGHRSMNPCPLYDEQTGTLFLFFIAIPGQVTEQQQLQTRANVTRL
CQVTSTDHGRTWSSPRDLTDAAIGPAYREWSTFAVGPGHCLQLHDRARSLVVPAYAYRKLHP
KQRPIPSAFCFLSHDHGRTWARGHFVAQDTLECQVAEVETGEQRVVTLNARSHLRARVQAQS
TNDGLDFQESQLVKKLVEPPPQGCQGSVISFPSPRSGPGSPAQWLLYTHPTHSWQRADLGAY
LNPRPPAPEAWSEPVLLAKGSAAYSDLQSMGTGPDGSPLFGCLYEANDYEEIVFLMFTLKQA
FPAEYLPQGGGGSGGGGSDKTHTCPPCPAPELLGGPSVFLFPPKPKDTLMISRTPEVTCVVV
DVSHEDPEVKFNWYVDGVEVHNAKTKPREEQYNSTYRVVSVLTVLHQDWLNGKEYKCKVSNK
ALPAPIEKTISKAKGQPREPQVYTLPPSREEMTKNQVSLTCLVKGFYPSDIAVEWESNGQPE
NNYKTTPPVLDSDGSFFLTSKLTVDKSRWQQGNVFSCSVMHEALHNHYTQKSLSLSPGK
SEQ ID NO: 69:
DASLPYLQDESVFQSGAHAYRIPALLYLPGQQSLLAFAEQRASKKDEHAELIVLRRGDYDAP
THQVQWQAQEVVAQARLDGHRSMNPCPLYDEQTGTLFLFFIAIPGQVTEQQQLQTRANVTRL
CQVTSTDHGRTWSSPRDLTDAAIGPAYREWSTFAVGPGHCLQLHDRARSLVVPAYAYRKLHP
KQRPIPSAFCFLSHDHGRTWARGHFVAQDTLECQVAEVETGEQRVVTLNARSHLRARVQAQS
TNDGLDFQESQLVKKLVEPPPQGCQGSVISFPSPRSGPGSPAQWLLYTHPTHSWQRADLGAY
LNPRPPAPEAWSEPVLLAKGSAAYSDLQSMGTGPDGSPLFGCLYEANDYEEIRFIMFTLKQA
FPAEYLPQGGGGSGGGGSDKTHTCPPCPAPELLGGPSVFLFPPKPKDTLMISRTPEVTCVVV
DVSHEDPEVKFNWYVDGVEVHNAKTKPREEQYNSTYRVVSVLTVLHQDWLNGKEYKCKVSNK
ALPAPIEKTISKAKGQPREPQVYTLPPSREEMTKNQVSLTCLVKGFYPSDIAVEWESNGQPE
NNYKTTPPVLDSDGSFFLTSKLTVDKSRWQQGNVFSCSVMHEALHNHYTQKSLSLSPGK
SEQ ID NO: 70:
DASLPYLQKESVFQSGAHAYRIPALLYLPGQQSLLAFAEQRASKKDEHAELIVLRRGDYDAN
THQVQWQAQEVVAQARLDGHRSMNPCPLYDAQTGTLFLFFIAIPGQVTEQQQLQTRANVTRL
CQVTSTDHGRTWSSPRDLTDAAIGPAYREWSTFAVGPGHCLQLHDRARSLVVPAYAYRKLHP
KQRPIPSAFCFLSHDHGRTWARGHFVAQDTLECQVAEVETGEQRVVTLNARSHLRARVQAQS
TNDGLDFQESQLVKKLVEPPPQGCQGSVISFPSPRSGPGSPAQWLLYTHPTHSWQRADLGAY
LNPRPPAPEAWSEPVLLAKGSAAYSDLQSMGTGPDGSPLFGCLYEANDYEEIVFLMFTLKQA
FPAEYLPQGGGGSGGGGSDKTHTCPPCPAPELLGGPSVFLFPPKPKDTLMISRTPEVTCVVV
DVSHEDPEVKFNWYVDGVEVHNAKTKPREEQYNSTYRVVSVLTVLHQDWLNGKEYKCKVSNK
ALPAPIEKTISKAKGQPREPQVYTLPPSREEMTKNQVSLTCLVKGFYPSDIAVEWESNGQPE
NNYKTTPPVLDSDGSFFLTSKLTVDKSRWQQGNVFSCSVMHEALHNHYTQKSLSLSPGK
SEQ ID NO: 71:
DASLPYLQKESVFQSGAHAYRIPALLYLPGQQSLLAFAEQRASKKDEHAELIVLRRGDYDAP
THQVQWQAQEVVAQARLDGHRSMNPCPLYDAQTGTLFLFFIAIPGQVTEQQQLQTRANVTRL
CQVTSTDHGRTWSSPRDLTDAAIGPAYREWSTFAVGPGHCLQLHDRARSLVVPAYAYRKLHP
KQRPIPSAFCFLSHDHGRTWARGHFVAQDTLECQVAEVETGEQRVVTLNARSHLRARVQAQS
TNDGLDFQESQLVKKLVEPPPAGCQGSVISFPSPRSGPGSPAQWLLYTHPTHRKQRADLGAY
LNPRPPAPEAWSEPVLLAKGSAAYSDLQSMGTGPDGSPLFGCLYEANDYEEIVFLMFTLKQA
FPAEYLPQGGGGSGGGGSDKTHTCPPCPAPELLGGPSVFLFPPKPKDTLMISRTPEVTCVVV
DVSHEDPEVKFNWYVDGVEVHNAKTKPREEQYNSTYRVVSVLTVLHQDWLNGKEYKCKVSNK
ALPAPIEKTISKAKGQPREPQVYTLPPSREEMTKNQVSLTCLVKGFYPSDIAVEWESNGQPE
NNYKTTPPVLDSDGSFFLTSKLTVDKSRWQQGNVFSCSVMHEALHNHYTQKSLSLSPGK
SEQ ID NO: 72:
DASLPYLQKESVFQSGAHAYRIPALLYLPGQQSLLAFAEQRASKKDEHAELIVLRRGDYDAS
THQVQWQAQEVVAQARLDGHRSMNPCPLYDAQTGTLFLFFIAIPGQVTEQQQLQTRANVTRL
CQVTSTDHGRTWSSPRDLTDAAIGPAYREWSTFAVGPGHCLQLHDRARSLVVPAYAYRKLHP
KQRPIPSAFCFLSHDHGRTWARGHFVAQDTLECQVAEVETGEQRVVTLNARSHLRARVQAQS
TNDGLDFQESQLVKKLVEPPPAGCQGSVISFPSPRSGPGSPAQWLLYTHPTHRKQRADLGAY
LNPRPPAPEAWSEPVLLAKGSAAYSDLQSMGTGPDGSPLFGCLYEANDYEEIVFLMFTLKQA
FPAEYLPQGGGGSGGGGSDKTHTCPPCPAPELLGGPSVFLFPPKPKDTLMISRTPEVTCVVV
DVSHEDPEVKFNWYVDGVEVHNAKTKPREEQYNSTYRVVSVLTVLHQDWLNGKEYKCKVSNK
ALPAPIEKTISKAKGQPREPQVYTLPPSREEMTKNQVSLTCLVKGFYPSDIAVEWESNGQPE
NNYKTTPPVLDSDGSFFLTSKLTVDKSRWQQGNVFSCSVMHEALHNHYTQKSLSLSPGK
SEQ ID NO: 73:
DASLPYLQKESVFQSGAHAYRIPALLYLPGQQSLLAFAEQRASKKDEHAELIVLRRGDYDAT
THQVQWQAQEVVAQARLDGHRSMNPCPLYDAQTGTLFLFFIAIPGQVTEQQQLQTRANVTRL
CQVTSTDHGRTWSSPRDLTDAAIGPAYREWSTFAVGPGHCLQLHDRARSLVVPAYAYRKLHP
KQRPIPSAFCFLSHDHGRTWARGHFVAQDTLECQVAEVETGEQRVVTLNARSHLRARVQAQS
TNDGLDFQESQLVKKLVEPPPAGCQGSVISFPSPRSGPGSPAQWLLYTHPTHRKQRADLGAY
LNPRPPAPEAWSEPVLLAKGSAAYSDLQSMGTGPDGSPLFGCLYEANDYEEIVFLMFTLKQA
FPAEYLPQGGGGSGGGGSDKTHTCPPCPAPELLGGPSVFLFPPKPKDTLMISRTPEVTCVVV
DVSHEDPEVKFNWYVDGVEVHNAKTKPREEQYNSTYRVVSVLTVLHQDWLNGKEYKCKVSNK
ALPAPIEKTISKAKGQPREPQVYTLPPSREEMTKNQVSLTCLVKGFYPSDIAVEWESNGQPE
NNYKTTPPVLDSDGSFFLTSKLTVDKSRWQQGNVFSCSVMHEALHNHYTQKSLSLSPGK
SEQ ID NO: 74:
DASLPYLQKESVFQSGAHAYRIPALLYLPGQQSLLAFAEQRASKKDEHAELIVLRRGDYDAN
THQVQWQAQEVVAQARLDGHRSMNPCPLYDAQTGTLFLFFIAIPGQVTEQQQLQTRANVTRL
CQVTSTDHGRTWSSPRDLTDAAIGPAYREWSTFAVGPGHCLQLHDRARSLVVPAYAYRKLHP
KQRPIPSAFCFLSHDHGRTWARGHFVAQDTLECQVAEVETGEQRVVTLNARSHLRARVQAQS
TNDGLDFQESQLVKKLVEPPPAGCQGSVISFPSPRSGPGSPAQWLLYTHPTHRKQRADLGAY
LNPRPPAPEAWSEPVLLAKGSAAYSDLQSMGTGPDGSPLFGCLYEANDYEEIVFLMFTLKQA
FPAEYLPQGGGGSGGGGSDKTHTCPPCPAPELLGGPSVFLFPPKPKDTLMISRTPEVTCVVV
DVSHEDPEVKFNWYVDGVEVHNAKTKPREEQYNSTYRVVSVLTVLHQDWLNGKEYKCKVSNK
ALPAPIEKTISKAKGQPREPQVYTLPPSREEMTKNQVSLTCLVKGFYPSDIAVEWESNGQPE
NNYKTTPPVLDSDGSFFLTSKLTVDKSRWQQGNVFSCSVMHEALHNHYTQKSLSLSPGK
SEQ ID NO: 75:
X₁ASLPX₂LQX₃ESVFQSGAHAYRIPALLYLPGQQSLLAFAEQRASKKDEHAELIVLRRGDYD
AX₄THQVQWQAQEVVAQARLDGHRSMNPCPLYDX₅QTGTLFLFFIAIPGQVTEQQQLQTRANV
TRLCQVTSTDHGRTWSSPRDLTDAAIGPAYREWSTFAVGPGHCLQLHDRARSLVVPAYAYRK
LHPX₆QRPIPSAFCFLSHDHGRTWARGHFVAQDTLECQVAEVETGEQRVVTLNARSHLRARVQ
AQSTNDGLDFQESQLVKKLVEPPPX₇GCQGSVISFPSPRSGPGSPAQWLLYTHPTHX₈X₉QRA
DLGAYLNPRPPAPEAWSEPVLLAKGSX₁₀AYSDLQSMGTGPDGSPLFGCLYEANDYEEIX₁₁F
X₁₂METLKQAFPAEYLPQGGGGSGGGGSDKTHTCPPCPAPELLGGPSVFLEPPKPKDTLMISR
TPEVTCVVVDVSHEDPEVKFNWYVDGVEVHNAKTKPREEQYNSTYRVVSVLTVLHQDWLNGK
EYKCKVSNKALPAPIEKTISKAKGQPREPQVYTLPPSREEMTKNQVSLTCLVKGFYPSDIAV
EWESNGQPENNYKTTPPVLDSDGSFFLTSKLTVDKSRWQQGNVFSCSVMHEALHNHYTQKSL
SLSPGK
SEQ ID NO: 76:
X₁X₂SX₃X₄X₅LQX₆ESVFQSGAHAYRIPALLYLPGQQSLLAFAEQRASX₇X₈DEHAELIVX₉RR
GDYDAX₁₀THQVQWX₁₁AQEVVAQAX₁₂LDGHRSMNPCPLYDX₁₃QTGTLFLFFIAIPX₁₄X₁₅VT
EX₁₆QQLQTRANVTRLX₁₇X₁₈VTSTDHGRTWSSPRDLTDAAIGPX₁₉YREWSTFAVGPGHX₂₀LQ
LHDRX₂₁RSLVVPAYAYRKLHPX₂₂QRPIPSAFX₂₃FLSHDHGRTWARGHFVAQDTX₂₄ECQVAE
VETGEQRVVTLNARSHLRARVQAQSX₂₅NX₂₆GLDFQX₂₇SQLVKKLVEPPPX₂₈GX₂₉QGSVISF
PSPRSGPGSPAQX₃₀LLYTHPTHX₃₁X₃₂QRADLGAYLNPRPPAPEAWSEPX₃₃LLAKGSX₃₄AYS
DLQSMGTGPDGSPLFGX₃₅LYEANDYEEIX₃₆FX₃₇MFTLKQAFPAEYLPQGGGGSGGGGSDKT
HTCPPCPAPELLGGPSVFLFPPKPKDTLMISRTPEVTCVVVDVSHEDPEVKFNWYVDGVEVH
NAKTKPREEQYNSTYRVVSVLTVLHQDWLNGKEYKCKVSNKALPAPIEKTISKAKGQPREPQ
VYTLPPSREEMTKNQVSLTCLVKGFYPSDIAVEWESNGQPENNYKTTPPVLDSDGSFFLTSK
LTVDKSRWQQGNVFSCSVMHEALHNHYTQKSLSLSPGK
SEQ ID NO: 77:
DASLPYLQKESVFQSGAHAYRIPALLYLPGQQSLLAFAEQRASKKDEHAELIVLRRGDYDAG
THQVQWQAQEVVAQARLDGHRSMNPCPLYDEQTGTLFLFFIAIPGQVTEQQQLQTRANVTRL
CQVTSTDHGRTWSSPRDLTDAAIGPAYREWSTFAVGPGHCLQLHDRARSLVVPAYAYRKLHP
KQRPIPSAFCFLSHDHGRTWARGHFVAQDTLECQVAEVETGEQRVVTLNARSHLRARVQAQS
TNDGLDFQESQLVKKLVEPPPQGCQGSVISFPSPRSGPGSPAQWLLYTHPTHSWQRADLGAY
LNPRPPAPEAWSEPVLLAKGSAAYSDLQSMGTGPDGSPLFGCLYEANDYEEIVFLMFTLKQA
FPAEYLPQGGGGSGGGGSDKTHTCPPCPAPELLGGPSVFLFPPKPKDTLMISRTPEVTCVVV
DVSHEDPEVKFNWYVDGVEVHNAKTKPREEQYNSTYRVVSVLTVLHQDWLNGKEYKCKVSNK
ALPAPIEKTISKAKGQPREPQVYTLPPSREEMTKNQVSLTCLVKGFYPSDIAVEWESNGQPE
NNYKTTPPVLDSDGSFFLYSKLTVDKSRWQQGNVFSCSVMHEALHNHYTQKSLSLSPGKGGG
GSGGGGSGGGGSEVQLVESGGGLVQPGGSLRLSCAASGFNIKDTYIHWVRQAPGKGLEWVAR
IYPTNGYTRYADSVKGRFTISADTSKNTAYLQMNSLRAEDTAVYYCSRWGGDGFYAMDYWGQ
GTLVTVSSGGGGSGGGGSGGGGSDIQMTQSPSSLSASVGDRVTITCRASQDVNTAVAWYQQK
PGKAPKLLIYSASFLYSGVPSRFSGSRSGTDFTLTISSLQPEDFATYYCQQHYTTPPTFGQG
TKVEIK
SEQ ID NO: 78:
DASLPYLQDESVFQSGAHAYRIPALLYLPGQQSLLAFAEQRASKKDEHAELIVLRRGDYDAP
THQVQWQAQEVVAQARLDGHRSMNPCPLYDEQTGTLFLFFIAIPGQVTEQQQLQTRANVTRL
CQVTSTDHGRTWSSPRDLTDAAIGPAYREWSTFAVGPGHCLQLHDRARSLVVPAYAYRKLHP
KQRPIPSAFCFLSHDHGRTWARGHFVAQDTLECQVAEVETGEQRVVTLNARSHLRARVQAQS
TNDGLDFQESQLVKKLVEPPPQGCQGSVISFPSPRSGPGSPAQWLLYTHPTHSWQRADLGAY
LNPRPPAPEAWSEPVLLAKGSAAYSDLQSMGTGPDGSPLFGCLYEANDYEEIRFIMFTLKQA
FPAEYLPQGGGGSGGGGSDKTHTCPPCPAPELLGGPSVFLFPPKPKDTLMISRTPEVTCVVV
DVSHEDPEVKFNWYVDGVEVHNAKTKPREEQYNSTYRVVSVLTVLHQDWLNGKEYKCKVSNK
ALPAPIEKTISKAKGQPREPQVYTLPPSREEMTKNQVSLTCLVKGFYPSDIAVEWESNGQPE
NNYKTTPPVLDSDGSFFLYSKLTVDKSRWQQGNVFSCSVMHEALHNHYTQKSLSLSPGKGGG
GSGGGGSGGGGSEVQLVESGGGLVQPGGSLRLSCAASGFNIKDTYIHWVRQAPGKGLEWVAR
IYPTNGYTRYADSVKGRFTISADTSKNTAYLQMNSLRAEDTAVYYCSRWGGDGFYAMDYWGQ
GTLVTVSSGGGGSGGGGSGGGGSDIQMTQSPSSLSASVGDRVTITCRASQDVNTAVAWYQQK
PGKAPKLLIYSASFLYSGVPSRFSGSRSGTDFTLTISSLQPEDFATYYCQQHYTTPPTFGQG
TKVEIK
SEQ ID NO: 79:
DASLPYLQKESVFQSGAHAYRIPALLYLPGQQSLLAFAEQRASKKDEHAELIVLRRGDYDAN
THQVQWQAQEVVAQARLDGHRSMNPCPLYDAQTGTLFLFFIAIPGQVTEQQQLQTRANVTRL
CQVTSTDHGRTWSSPRDLTDAAIGPAYREWSTFAVGPGHCLQLHDRARSLVVPAYAYRKLHP
KQRPIPSAFCFLSHDHGRTWARGHFVAQDTLECQVAEVETGEQRVVTLNARSHLRARVQAQS
TNDGLDFQESQLVKKLVEPPPQGCQGSVISFPSPRSGPGSPAQWLLYTHPTHSWQRADLGAY
LNPRPPAPEAWSEPVLLAKGSAAYSDLQSMGTGPDGSPLFGCLYEANDYEEIVFLMFTLKQA
FPAEYLPQGGGGSGGGGSDKTHTCPPCPAPELLGGPSVFLFPPKPKDTLMISRTPEVTCVVV
DVSHEDPEVKFNWYVDGVEVHNAKTKPREEQYNSTYRVVSVLTVLHQDWLNGKEYKCKVSNK
ALPAPIEKTISKAKGQPREPQVYTLPPSREEMTKNQVSLTCLVKGFYPSDIAVEWESNGQPE
NNYKTTPPVLDSDGSFFLYSKLTVDKSRWQQGNVFSCSVMHEALHNHYTQKSLSLSPGKGGG
GSGGGGSGGGGSEVQLVESGGGLVQPGGSLRLSCAASGFNIKDTYIHWVRQAPGKGLEWVAR
IYPTNGYTRYADSVKGRFTISADTSKNTAYLQMNSLRAEDTAVYYCSRWGGDGFYAMDYWGQ
GTLVTVSSGGGGSGGGGSGGGGSDIQMTQSPSSLSASVGDRVTITCRASQDVNTAVAWYQQK
PGKAPKLLIYSASFLYSGVPSRFSGSRSGTDFTLTISSLQPEDFATYYCQQHYTTPPTFGQG
TKVEIK
SEQ ID NO: 80:
DASLPYLQKESVFQSGAHAYRIPALLYLPGQQSLLAFAEQRASKKDEHAELIVLRRGDYDAP
THQVQWQAQEVVAQARLDGHRSMNPCPLYDAQTGTLFLFFIAIPGQVTEQQQLQTRANVTRL
CQVTSTDHGRTWSSPRDLTDAAIGPAYREWSTFAVGPGHCLQLHDRARSLVVPAYAYRKLHP
KQRPIPSAFCFLSHDHGRTWARGHFVAQDTLECQVAEVETGEQRVVTLNARSHLRARVQAQS
TNDGLDFQESQLVKKLVEPPPAGCQGSVISFPSPRSGPGSPAQWLLYTHPTHRKQRADLGAY
LNPRPPAPEAWSEPVLLAKGSAAYSDLQSMGTGPDGSPLFGCLYEANDYEEIVFLMFTLKQA
FPAEYLPQGGGGSGGGGSDKTHTCPPCPAPELLGGPSVFLFPPKPKDTLMISRTPEVTCVVV
DVSHEDPEVKFNWYVDGVEVHNAKTKPREEQYNSTYRVVSVLTVLHQDWLNGKEYKCKVSNK
ALPAPIEKTISKAKGQPREPQVYTLPPSREEMTKNQVSLTCLVKGFYPSDIAVEWESNGQPE
NNYKTTPPVLDSDGSFFLYSKLTVDKSRWQQGNVFSCSVMHEALHNHYTQKSLSLSPGKGGG
GSGGGGSGGGGSEVQLVESGGGLVQPGGSLRLSCAASGFNIKDTYIHWVRQAPGKGLEWVAR
IYPTNGYTRYADSVKGRFTISADTSKNTAYLQMNSLRAEDTAVYYCSRWGGDGFYAMDYWGQ
GTLVTVSSGGGGSGGGGSGGGGSDIQMTQSPSSLSASVGDRVTITCRASQDVNTAVAWYQQK
PGKAPKLLIYSASFLYSGVPSRFSGSRSGTDFTLTISSLQPEDFATYYCQQHYTTPPTFGQG
TKVEIK
SEQ ID NO: 81:
DASLPYLQKESVFQSGAHAYRIPALLYLPGQQSLLAFAEQRASKKDEHAELIVLRRGDYDAS
THQVQWQAQEVVAQARLDGHRSMNPCPLYDAQTGTLFLFFIAIPGQVTEQQQLQTRANVTRL
CQVTSTDHGRTWSSPRDLTDAAIGPAYREWSTFAVGPGHCLQLHDRARSLVVPAYAYRKLHP
KQRPIPSAFCFLSHDHGRTWARGHFVAQDTLECQVAEVETGEQRVVTLNARSHLRARVQAQS
TNDGLDFQESQLVKKLVEPPPAGCQGSVISFPSPRSGPGSPAQWLLYTHPTHRKQRADLGAY
LNPRPPAPEAWSEPVLLAKGSAAYSDLQSMGTGPDGSPLFGCLYEANDYEEIVFLMETLKQA
FPAEYLPQGGGGSGGGGSDKTHTCPPCPAPELLGGPSVFLFPPKPKDTLMISRTPEVTCVVV
DVSHEDPEVKFNWYVDGVEVHNAKTKPREEQYNSTYRVVSVLTVLHQDWLNGKEYKCKVSNK
ALPAPIEKTISKAKGQPREPQVYTLPPSREEMTKNQVSLTCLVKGFYPSDIAVEWESNGQPE
NNYKTTPPVLDSDGSFFLYSKLTVDKSRWQQGNVFSCSVMHEALHNHYTQKSLSLSPGKGGG
GSGGGGSGGGGSEVQLVESGGGLVQPGGSLRLSCAASGFNIKDTYIHWVRQAPGKGLEWVAR
IYPTNGYTRYADSVKGRFTISADTSKNTAYLQMNSLRAEDTAVYYCSRWGGDGFYAMDYWGQ
GTLVTVSSGGGGSGGGGSGGGGSDIQMTQSPSSLSASVGDRVTITCRASQDVNTAVAWYQQK
PGKAPKLLIYSASFLYSGVPSRFSGSRSGTDFTLTISSLQPEDFATYYCQQHYTTPPTFGQG
TKVEIK
SEQ ID NO: 82:
DASLPYLQKESVFQSGAHAYRIPALLYLPGQQSLLAFAEQRASKKDEHAELIVLRRGDYDAT
THQVQWQAQEVVAQARLDGHRSMNPCPLYDAQTGTLFLFFIAIPGQVTEQQQLQTRANVTRL
CQVTSTDHGRTWSSPRDLTDAAIGPAYREWSTFAVGPGHCLQLHDRARSLVVPAYAYRKLHP
KQRPIPSAFCFLSHDHGRTWARGHFVAQDTLECQVAEVETGEQRVVTLNARSHLRARVQAQS
TNDGLDFQESQLVKKLVEPPPAGCQGSVISFPSPRSGPGSPAQWLLYTHPTHRKQRADLGAY
LNPRPPAPEAWSEPVLLAKGSAAYSDLQSMGTGPDGSPLFGCLYEANDYEEIVFLMFTLKQA
FPAEYLPQGGGGSGGGGSDKTHTCPPCPAPELLGGPSVFLFPPKPKDTLMISRTPEVTCVVV
DVSHEDPEVKFNWYVDGVEVHNAKTKPREEQYNSTYRVVSVLTVLHQDWLNGKEYKCKVSNK
ALPAPIEKTISKAKGQPREPQVYTLPPSREEMTKNQVSLTCLVKGFYPSDIAVEWESNGQPE
NNYKTTPPVLDSDGSFFLYSKLTVDKSRWQQGNVFSCSVMHEALHNHYTQKSLSLSPGKGGG
GSGGGGSGGGGSEVQLVESGGGLVQPGGSLRLSCAASGFNIKDTYIHWVRQAPGKGLEWVAR
IYPTNGYTRYADSVKGRFTISADTSKNTAYLQMNSLRAEDTAVYYCSRWGGDGFYAMDYWGQ
GTLVTVSSGGGGSGGGGSGGGGSDIQMTQSPSSLSASVGDRVTITCRASQDVNTAVAWYQQK
PGKAPKLLIYSASFLYSGVPSRFSGSRSGTDFTLTISSLQPEDFATYYCQQHYTTPPTFGQG
TKVEIK
SEQ ID NO: 83:
DASLPYLQKESVFQSGAHAYRIPALLYLPGQQSLLAFAEQRASKKDEHAELIVLRRGDYDAN
THQVQWQAQEVVAQARLDGHRSMNPCPLYDAQTGTLFLFFIAIPGQVTEQQQLQTRANVTRL
CQVTSTDHGRTWSSPRDLTDAAIGPAYREWSTFAVGPGHCLQLHDRARSLVVPAYAYRKLHP
KQRPIPSAFCFLSHDHGRTWARGHFVAQDTLECQVAEVETGEQRVVTLNARSHLRARVQAQS
TNDGLDFQESQLVKKLVEPPPAGCQGSVISFPSPRSGPGSPAQWLLYTHPTHRKQRADLGAY
LNPRPPAPEAWSEPVLLAKGSAAYSDLQSMGTGPDGSPLFGCLYEANDYEEIVFLMFTLKQA
FPAEYLPQGGGGSGGGGSDKTHTCPPCPAPELLGGPSVFLFPPKPKDTLMISRTPEVTCVVV
DVSHEDPEVKFNWYVDGVEVHNAKTKPREEQYNSTYRVVSVLTVLHQDWLNGKEYKCKVSNK
ALPAPIEKTISKAKGQPREPQVYTLPPSREEMTKNQVSLTCLVKGFYPSDIAVEWESNGQPE
NNYKTTPPVLDSDGSFFLYSKLTVDKSRWQQGNVFSCSVMHEALHNHYTQKSLSLSPGKGGG
GSGGGGSGGGGSEVQLVESGGGLVQPGGSLRLSCAASGFNIKDTYIHWVRQAPGKGLEWVAR
IYPTNGYTRYADSVKGRFTISADTSKNTAYLQMNSLRAEDTAVYYCSRWGGDGFYAMDYWGQ
GTLVTVSSGGGGSGGGGSGGGGSDIQMTQSPSSLSASVGDRVTITCRASQDVNTAVAWYQQK
PGKAPKLLIYSASFLYSGVPSRFSGSRSGTDFTLTISSLQPEDFATYYCQQHYTTPPTFGQG
TKVEIK
SEQ ID NO: 84:
X₁ASLPX₂LQX₃ESVFQSGAHAYRIPALLYLPGQQSLLAFAEQRASKKDEHAELIVLRRGDYD
AX₄THQVQWQAQEVVAQARLDGHRSMNPCPLYDX₅QTGTLFLFFIAIPGQVTEQQQLQTRANV
TRLCQVTSTDHGRTWSSPRDLTDAAIGPAYREWSTFAVGPGHCLQLHDRARSLVVPAYAYRK
LHPX₆QRPIPSAFCFLSHDHGRTWARGHFVAQDTLECQVAEVETGEQRVVTLNARSHLRARVQ
AQSTNDGLDFQESQLVKKLVEPPPX₇GCQGSVISFPSPRSGPGSPAQWLLYTHPTHX₈X₉QRA
DLGAYLNPRPPAPEAWSEPVLLAKGSX₁₀AYSDLQSMGTGPDGSPLFGCLYEANDYEEIX₁₁F
X₁₂MFTLKQAFPAEYLPQGGGGSGGGGSDKTHTCPPCPAPELLGGPSVFLFPPKPKDTLMISRT
PEVTCVVVDVSHEDPEVKFNWYVDGVEVHNAKTKPREEQYNSTYRVVSVLTVLHQDWLNGKE
YKCKVSNKALPAPIEKTISKAKGQPREPQVYTLPPSREEMTKNQVSLTCLVKGFYPSDIAVE
WESNGQPENNYKTTPPVLDSDGSFFLYSKLTVDKSRWQQGNVFSCSVMHEALHNHYTQKSLS
LSPGKGGGGSGGGGSGGGGSEVQLVESGGGLVQPGGSLRLSCAASGFNIKDTYIHWVRQAPG
KGLEWVARIYPTNGYTRYADSVKGRFTISADTSKNTAYLQMNSLRAEDTAVYYCSRWGGDGF
YAMDYWGQGTLVTVSSGGGGSGGGGSGGGGSDIQMTQSPSSLSASVGDRVTITCRASQDVNT
AVAWYQQKPGKAPKLLIYSASFLYSGVPSRFSGSRSGTDFTLTISSLQPEDFATYYCQQHYT
TPPTFGQGTKVEIK
SEQ ID NO: 85:
X₁X₂SX₃X₄X₅LQX₆ESVFQSGAHAYRIPALLYLPGQQSLLAFAEQRASX₇X₈DEHAELIVX₉RR
GDYDAX₁₀THQVQWX₁₁AQEVVAQAX₁₂LDGHRSMNPCPLYDX₁₃QTGTLFLFFIAIPX₁₄X₁₅VT
EX₁₆QQLQTRANVTRLX₁₇X₁₈VTSTDHGRTWSSPRDLTDAAIGPX₁₉YREWSTFAVGPGHX₂₀LQ
LHDRX₂₁RSLVVPAYAYRKLHPX₂₂QRPIPSAFX₂₃FLSHDHGRTWARGHFVAQDTX₂₄ECQVAE
VETGEQRVVTLNARSHLRARVQAQSX₂₅NX₂₆GLDFQX₂₇SQLVKKLVEPPPX₂₈GX₂₉QGSVISF
PSPRSGPGSPAQX₃₀LLYTHPTHX₃₁X₃₂QRADLGAYLNPRPPAPEAWSEPX₃₃LLAKGSX₃₄AYS
DLQSMGTGPDGSPLFGX₃₅LYEANDYEEIX₃₆FX₃₇MFTLKQAFPAEYLPQGGGGSGGGGSDKT
HTCPPCPAPELLGGPSVFLFPPKPKDTLMISRTPEVTCVVVDVSHEDPEVKFNWYVDGVEVH
NAKTKPREEQYNSTYRVVSVLTVLHQDWLNGKEYKCKVSNKALPAPIEKTISKAKGQPREPQ
VYTLPPSREEMTKNQVSLTCLVKGFYPSDIAVEWESNGQPENNYKTTPPVLDSDGSFFLYSK
LTVDKSRWQQGNVFSCSVMHEALHNHYTQKSLSLSPGKGGGGSGGGGSGGGGSEVQLVESGG
GLVQPGGSLRLSCAASGFNIKDTYIHWVRQAPGKGLEWVARIYPTNGYTRYADSVKGRFTIS
ADTSKNTAYLQMNSLRAEDTAVYYCSRWGGDGFYAMDYWGQGTLVTVSSGGGGSGGGGSGGG
GSDIQMTQSPSSLSASVGDRVTITCRASQDVNTAVAWYQQKPGKAPKLLIYSASFLYSGVPS
RFSGSRSGTDFTLTISSLQPEDFATYYCQQHYTTPPTFGQGTKVEIK
SEQ ID NO: 86:
GACATCCAGATGACACAGAGCCCTAGCAGCCTGTCTGCCAGCGTGGGAGACAGAGTGACCAT
CACCTGTAGAGCCAGCCAGGACGTGAACACAGCCGTGGCTTGGTATCAGCAGAAGCCTGGCA
AGGCCCCTAAGCTGCTGATCTACAGCGCCAGCTTTCTGTACTCCGGCGTGCCCAGCAGATTC
AGCGGCTCTAGAAGCGGCACCGACTTCACCCTGACCATAAGCAGTCTGCAGCCCGAGGACTT
CGCCACCTACTACTGTCAGCAGCACTACACCACACCTCCAACCTTTGGCCAGGGCACCAAGG
TGGAAATCAAGCGTACGGTGGCTGCACCATCTGTCTTCATCTTCCCGCCATCTGATGAGCAG
TTGAAATCTGGAACTGCCTCTGTTGTGTGCCTGCTGAATAACTTCTATCCCAGAGAGGCCAA
AGTACAGTGGAAGGTGGATAACGCCCTCCAATCGGGTAACTCCCAGGAGAGTGTCACAGAGC
AGGACAGCAAGGACAGCACCTACAGCCTCAGCAGCACCCTGACGCTGAGCAAAGCAGACTAC
GAGAAACACAAAGTCTACGCCTGCGAAGTCACCCATCAGGGCCTGAGCTCGCCCGTCACAAA
GAGCTTCAACAGGGGAGAGTGT
SEQ ID NO: 87:
GAGGTGCAGCTGGTTGAATCTGGCGGAGGACTGGTTCAGCCTGGCGGATCTCTGAGACTGTC
TTGTGCCGCCAGCGGCTTCAACATCAAGGACACCTACATCCACTGGGTCCGACAGGCCCCTG
GCAAAGGACTTGAATGGGTCGCCAGAATCTACCCCACCAACGGCTACACCAGATACGCCGAC
TCTGTGAAGGGCAGATTCACCATCAGCGCCGACACCAGCAAGAACACCGCCTACCTGCAGAT
GAACAGCCTGAGAGCCGAGGACACCGCCGTGTACTACTGTTCTAGATGGGGAGGCGACGGCT
TCTACGCCATGGATTATTGGGGCCAGGGCACCCTGGTCACCGTTTCTTCTGCtagcACCAAG
GGCCCATCcGTCTTCCCCCTGGCACCCTCCTCCAAGAGCACCTCTGGGGGCACAGCGGCCCT
GGGCTGCCTGGTCAAGGACTACTTCCCCGAACCGGTGACGGTGTCcTGGAACTCAGGCGCtC
TGACCAGCGGCGTGCACACCTTCCCGGCTGTCCTACAGTCCTCAGGACTCTACTCCCTCAGC
AGCGTGGTGACCGTGCCCTCCAGCAGCTTGGGCACCCAGACCTACATCTGCAACGTGAATCA
CAAGCCGAGCAACACCAAGGTGGAGAAGAAAGTTGAGCCCAAATCTTGTGAGAAAACTCACA
CATGCCCACCGTGCCCAGCACCTGAACTCCTGGGGGGACCGTCAGTCTTCCTCTTCCCCCCA
AAACCCAAGGACACCCTCATGATCTCCCGGACCCCTGAGGTCACATGCGTGGTGGTGGACGT
GAGCCACGAAGACCCTGAGGTCAAGTTCAACTGGTACGTGGACGGCGTGGAGGTGCATAATG
CCAAGACAAAGCCGCGGGAGGAGCAGTACAACAGCACGTACCGTGTGGTCAGCGTCCTCACC
GTCCTGCACCAGGACTGGCTGAATGGCAAGGAGTACAAGTGCAAGGTCTCCAACAAAGCCCT
CCCAGCCCCCATCGAGAAAACCATCTCCAAAGCCAAAGGGCAGCCCCGAGAACCACAGGTcT
ACACCCTGCCCCCATCCCGGGAGGAGATGACCAAGAACCAGGTCAGCCTGtacTGCCTGGTC
AAAGGCTTCTATCCCAGCGACATCGCCGTGGAGTGGGAGAGCAATGGGCAGCCGGAGAACAA
CTACAAGACCACGCCTCCCGTGCTGGACTCCGACGGCTCCTTCTTCCTCTATAGCAAGCTCA
CCGTGGACAAGAGCAGGTGGCAGCAGGGGAACGTCTTCTCATGCTCCGTGATGCATGAGGCT
CTGCACAACCACTACACGCAGAAGAGCCTCTCCCTGTCTCCGGGTAAA
SEQ ID NO: 88:
GATGCATCTCTGCCTTACCTGCAGAAAGAAAGCGTGTTCCAGTCTGGCGCCCACGCCTACAG
AATTCCCGCTCTGCTGTATCTGCCAGGCCAGCAGTCTCTGCTGGCTTTCGCTGAACAGCGGG
CCAGCAAGAAGGATGAGCACGCCGAACTGATCGTGCTGCGGAGAGGCGATTACGACGCCGGC
ACACATCAGGTGCAGTGGCAGGCTCAAGAGGTGGTGGCTCAGGCTAGACTGGACGGCCACAG
ATCTATGAACCCCTGTCCTCTGTACGATGAACAGACCGGCACACTGTTTCTGTTCTTTATCG
CTATCCCCGGCCAAGTGACCGAGCAGCAGCAGCTGCAGACAAGAGCCAACGTGACCAGACTG
TGTCAAGTGACCTCCACCGACCACGGCAGAACCTGGTCTAGCCCTAGAGATCTGACCGACGC
CGCCATCGGACCTGCCTATAGAGAGTGGTCCACCTTCGCCGTTGGACCTGGACACTGTCTCC
AGCTGCACGACAGGGCTAGATCTCTGGTGGTGCCTGCCTACGCCTATAGAAAGCTGCACCCC
AAACAGCGGCCTATTCCTAGCGCCTTCTGCTTTCTGAGCCACGATCACGGCAGGACATGGGC
CAGAGGACATTTCGTGGCCCAGGACACACTGGAATGCCAGGTGGCCGAAGTGGAAACCGGCG
AGCAGAGAGTCGTGACCCTGAACGCCAGATCTCACCTGAGAGCCAGAGTGCAGGCCCAGAGC
ACAAACGACGGCCTGGATTTCCAAGAGAGCCAGCTGGTCAAGAAACTGGTGGAACCTCCTCC
ACAGGGCTGTCAGGGAAGCGTGATCAGCTTTCCATCTCCTAGAAGCGGCCCTGGCTCTCCTG
CTCAGTGGCTGCTGTATACACACCCCACACACAGCTGGCAGAGAGCCGATCTGGGCGCCTAC
CTGAATCCTAGACCTCCTGCTCCTGAGGCTTGGAGCGAACCTGTTCTGCTGGCCAAGGGCAG
CGCTGCCTACAGCGATCTGCAGTCTATGGGCACAGGCCCTGATGGCAGCCCTCTGTTTGGCT
GTCTGTACGAGGCCAACGACTACGAAGAGATCGTGTTCCTGATGTTCACCCTGAAGCAGGCC
TTTCCAGCCGAGTACCTGCCTCAAGGCGGAGGTGGAAGTGGCGGAGGCGGATCCGACAAAAC
TCACACATGCCCACCGTGCCCAGCACCTGAACTCCTGGGGGGACCGTCAGTCTTCCTCTTCC
CCCCAAAACCCAAGGACACCCTCATGATCTCCCGGACCCCTGAGGTCACATGCGTGGTGGTG
GACGTGAGCCACGAAGACCCTGAGGTCAAGTTCAACTGGTACGTGGACGGCGTGGAGGTGCA
TAATGCCAAGACAAAGCCGCGGGAGGAGCAGTACAACAGCACGTACCGTGTGGTCAGCGTCC
TCACCGTCCTGCACCAGGACTGGCTGAATGGCAAGGAGTACAAGTGCAAGGTCTCCAACAAA
GCCCTCCCAGCCCCCATCGAGAAAACCATCTCCAAAGCCAAAGGGCAGCCCCGAGAACCACA
GGTCTACACCCTGCCCCCATCCCGGGAGGAGATGACCAAGAACCAGGTCAGCCTGACCTGCC
TGGTCAAAGGCTTCTATCCCAGCGACATCGCCGTGGAGTGGGAGAGCAATGGGCAGCCGGAG
AACAACTACAAGACCACGCCTCCCGTGCTGGACTCCGACGGCTCCTTCTTCCTCACTAGCAA
GCTCACCGTGGACAAGAGCAGGTGGCAGCAGGGGAACGTCTTCTCATGCTCCGTGATGCATG
AGGCTCTGCACAACCACTACACGCAGAAGAGCCTCTCCCTGTCTCCGGGTAAA
SEQ ID NO: 89:
GATGCATCTCTGCCTTACCTGCAGAAAGAAAGCGTGTTCCAGTCTGGCGCCCACGCCTACAG
AATTCCCGCTCTGCTGTATCTGCCAGGCCAGCAGTCTCTGCTGGCTTTCGCTGAACAGCGGG
CCAGCAAGAAGGATGAGCACGCCGAACTGATCGTGCTGCGGAGAGGCGATTACGACGCCGGC
ACACATCAGGTGCAGTGGCAGGCTCAAGAGGTGGTGGCTCAGGCTAGACTGGACGGCCACAG
ATCTATGAACCCCTGTCCTCTGTACGATGAACAGACCGGCACACTGTTTCTGTTCTTTATCG
CTATCCCCGGCCAAGTGACCGAGCAGCAGCAGCTGCAGACAAGAGCCAACGTGACCAGACTG
TGTCAAGTGACCTCCACCGACCACGGCAGAACCTGGTCTAGCCCTAGAGATCTGACCGACGC
CGCCATCGGACCTGCCTATAGAGAGTGGTCCACCTTCGCCGTTGGACCTGGACACTGTCTCC
AGCTGCACGACAGGGCTAGATCTCTGGTGGTGCCTGCCTACGCCTATAGAAAGCTGCACCCC
AAACAGCGGCCTATTCCTAGCGCCTTCTGCTTTCTGAGCCACGATCACGGCAGGACATGGGC
CAGAGGACATTTCGTGGCCCAGGACACACTGGAATGCCAGGTGGCCGAAGTGGAAACCGGCG
AGCAGAGAGTCGTGACCCTGAACGCCAGATCTCACCTGAGAGCCAGAGTGCAGGCCCAGAGC
ACAAACGACGGCCTGGATTTCCAAGAGAGCCAGCTGGTCAAGAAACTGGTGGAACCTCCTCC
ACAGGGCTGTCAGGGAAGCGTGATCAGCTTTCCATCTCCTAGAAGCGGCCCTGGCTCTCCTG
CTCAGTGGCTGCTGTATACACACCCCACACACAGCTGGCAGAGAGCCGATCTGGGCGCCTAC
CTGAATCCTAGACCTCCTGCTCCTGAGGCTTGGAGCGAACCTGTTCTGCTGGCCAAGGGCAG
CGCTGCCTACAGCGATCTGCAGTCTATGGGCACAGGCCCTGATGGCAGCCCTCTGTTTGGCT
GTCTGTACGAGGCCAACGACTACGAAGAGATCGTGTTCCTGATGTTCACCCTGAAGCAGGCC
TTTCCAGCCGAGTACCTGCCTCAA
SEQ ID NO: 90:
TVEKSVVFKAEGEHFTDQKGNTIVGSGSGGTTKYFRIPAMCTTSKGTIVVFADARHNTASDQ
SFIDTAAARSTDGGKTWNKKIAIYNDRVNSKLSRVMDPTCIVANIQGRETILVMVGKWNNND
KTWGAYRDKAPDTDWDLVLYKSTDDGVTFSKVETNIHDIVTKNGTISAMLGGVGSGLQLNDG
KLVFPVQMVRTKNITTVLNTSFIYSTDGITWSLPSGYCEGFGSENNIIEFNASLVNNIRNSG
LRRSFETKDFGKTWTEFPPMDKKVDNRNHGVQGSTITIPSGNKLVAAHSSAQNKNNDYTRSD
ISLYAHNLYSGEVKLIDDFYPKVGNASGAGYSCLSYRKNVDKETLYVVYEANGSIEFQDLSR
HLPVIKSYNGGGGSGGGGSDKTHTCPPCPAPELLGGPSVFLFPPKPKDTLMISRTPEVTCVV
VDVSHEDPEVKFNWYVDGVEVHNAKTKPREEQYNSTYRVVSVLTVLHQDWLNGKEYKCKVSN
KALPAPIEKTISKAKGQPREPQVYTLPPSREEMTKNQVSLTCLVKGFYPSDIAVEWESNGQP
ENNYKTTPPVLDSDGSFFLTSKLTVDKSRWQQGNVFSCSVMHEALHNHYTQKSLSLSPGK
SEQ ID NO: 91:
ACAGTGGAAAAGTCCGTGGTGTTCAAGGCCGAGGGCGAGCACTTCACCGACCAGAAAGGCAA
TACCATCGTCGGCTCTGGCAGCGGCGGCACCACCAAGTACTTTAGAATCCCCGCCATGTGCA
CCACCAGCAAGGGCACCATTGTGGTGTTCGCCGACGCCAGACACAACACCGCCAGCGATCAG
AGCTTCATCGATACCGCTGCCGCCAGATCTACCGATGGCGGCAAGACCTGGAACAAGAAGAT
CGCCATCTACAACGACCGCGTGAACAGCAAGCTGAGCAGAGTGATGGACCCTACCTGCATCG
TGGCCAACATCCAGGGCAGAGAAACCATCCTGGTCATGGTCGGAAAGTGGAACAACAACGAT
AAGACCTGGGGCGCCTACAGAGACAAGGCCCCTGATACCGATTGGGACCTCGTGCTGTACAA
GAGCACCGATGACGGCGTGACCTTCAGCAAGGTGGAAACAAACATCCACGACATCGTGACCA
AGAACGGCACCATCTCTGCCATGCTCGGCGGCGTTGGATCTGGCCTGCAACTGAATGATGGC
AAGCTGGTGTTCCCCGTGCAGATGGTCCGAACAAAGAATATCACCACCGTGCTGAATACCAG
CTTCATCTACAGCACCGACGGCATCACATGGTCCCTGCCTAGCGGCTACTGTGAAGGCTTTG
GCAGCGAGAACAACATCATCGAGTTCAACGCCAGCCTGGTCAACAACATCCGGAACAGCGGC
CTGCGGAGAAGCTTCGAGACAAAGGACTTCGGAAAGACGTGGACCGAGTTTCCTCCAATGGA
CAAGAAGGTGGACAACCGGAACCACGGCGTGCAGGGCAGCACAATCACAATCCCTAGCGGCA
ACAAACTGGTGGCCGCTCACTCTAGCGCCCAGAACAAGAACAACGACTACACCAGAAGCGAC
ATCAGCCTGTACGCCCACAACCTGTACAGCGGCGAAGTGAAGCTGATCGACGACTTCTACCC
CAAAGTGGGCAATGCCAGCGGAGCCGGCTACAGCTGTCTGAGCTACCGGAAAAATGTGGACA
AAGAAACCCTGTACGTGGTGTACGAGGCCAACGGCAGCATCGAGTTTCAGGACCTGAGCAGA
CATCTGCCCGTGATCAAGAGCTACAACggcggaggtggaagtggcggaggcggatccgacaa
aactcacacatgcccaccgtgcccagcacctgaactcctggggggaccgtcagtcttcctct
tccccccaaaacccaaggacaccctcatgatctcccggacccctgaggtcacatgcgtggtg
gtggacgtgagccacgaagaccctgaggtcaagttcaactggtacgtggacggcgtggaggt
gcataatgccaagacaaagccgcgggaggagcagtacaacagcacgtaccgtgtggtcagcg
tcctcaccgtcctgcaccaggactggctgaatggcaaggagtacaagtgcaaggtctccaac
aaagccctcccagcccccatcgagaaaaccatctccaaagccaaagggcagccccgagaacc
acaggtctacaccctgcccccatcccgggaggagatgaccaagaaccaggtcagcctgacct
gcctggtcaaaggcttctatcccagcgacatcgccgtggagtgggagagcaatgggcagccg
gagaacaactacaagaccacgcctcccgtgctggactccgacggctccttcttcctcactag
caagctcaccgtggacaagagcaggtggcagcaggggaacgtcttctcatgctccgtgatgc
atgaggctctgcacaaccactacacgcagaagagcctctccctgtctccgggtaaa
SEQ ID NO: 92:
EVQLVESGGGLVQPGGSLRLSCAASGFNIKDTYIHWVRQAPGKGLEWVARIYPTNGYTRYAD
SVKGRFTISADTSKNTAYLQMNSLRAEDTAVYYCSRWGGDGFYAMDYWGQGTLVTVSSASTK
GPSVFPLAPSSKSTSGGTAALGCLVKDYFPEPVTVSWNSGALTSGVHTFPAVLQSSGLYSLS
SVVTVPSSSLGTQTYICNVNHKPSNTKVDKKVEPKSCDKTHTCPPCPAPELLGGPSVFLFPP
KPKDTLMISRTPEVTCVVVDVSHEDPEVKFNWYVDGVEVHNAKTKPREEQYNSTYRVVSVLT
VLHQDWLNGKEYKCKVSNKALPAPIEKTISKAKGQPREPQVYTLPPSREEMTKNQVSLTCLV
KGFYPSDIAVEWESNGQPENNYKTTPPVLDSDGSFFLYSKLTVDKSRWQQGNVFSCSVMHEA
LHNHYTQKSLSLSPGKGGGGSGGGGSGGGGSTVEKSVVFKAEGEHFTDQKGNTIVGSGSGGT
TKYFRIPAMCTTSKGTIVVFADARHNTASDQSFIDTAAARSTDGGKTWNKKIAIYNDRVNSK
LSRVMDPTCIVANIQGRETILVMVGKWNNNDKTWGAYRDKAPDTDWDLVLYKSTDDGVTFSK
VETNIHDIVTKNGTISAMLGGVGSGLQLNDGKLVFPVQMVRTKNITTVLNTSFIYSTDGITW
SLPSGYCEGFGSENNIIEFNASLVNNIRNSGLRRSFETKDFGKTWTEFPPMDKKVDNRNHGV
QGSTITIPSGNKLVAAHSSAQNKNNDYTRSDISLYAHNLYSGEVKLIDDFYPKVGNASGAGY
SCLSYRKNVDKETLYVVYEANGSIEFQDLSRHLPVIKSYN
SEQ ID NO: 93:
gaggtgcagctggttgaatctggcggaggactggttcagcctggcggatctctgagactgtc
ttgtgccgccagcggcttcaacatcaaggacacctacatccactgggtccgacaggcccctg
gcaaaggacttgaatgggtcgccagaatctaccccaccaacggctacaccagatacgccgac
tctgtgaagggcagattcaccatcagcgccgacaccagcaagaacaccgcctacctgcagat
gaacagcctgagagccgaggacaccgccgtgtactactgttctagatggggaggcgacggct
tctacgccatggattattggggccagggcaccctggtcaccgtttcttctgctagcaccaag
ggcccatccgtcttccccctggcaccctcctccaagagcacctctgggggcacagcggccct
gggctgcctggtcaaggactacttccccgaaccggtgacggtgtcctggaactcaggcgctc
tgaccagcggcgtgcacaccttcccggctgtcctacagtcctcaggactctactccctcage
agcgtggtgaccgtgccctccagcagcttgggcacccagacctacatctgcaacgtgaatca
caagcccagcaacaccaaggtggacaagaaagttgagcccaaatcttgtgacaaaactcaca
catgcccaccgtgcccagcacctgaactcctggggggaccgtcagtcttcctcttcccccca
aaacccaaggacaccctcatgatctcccggacccctgaggtcacatgcgtggtggtggacgt
gagccacgaagaccctgaggtcaagttcaactggtacgtggacggcgtggaggtgcataatg
ccaagacaaagccgcgggaggagcagtacaacagcacgtaccgtgtggtcagcgtcctcacc
gtcctgcaccaggactggctgaatggcaaggagtacaagtgcaaggtctccaacaaagccct
cccagcccccatcgagaaaaccatctccaaagccaaagggcagccccgagaaccacaggtct
acaccctgcccccatcccgggaggagatgaccaagaaccaggtcagcctgacctgcctggtc
aaaggcttctatcccagcgacatcgccgtggagtgggagagcaatgggcagccggagaacaa
ctacaagaccacgcctcccgtgctggactccgacggctccttcttcctctatagcaagctca
ccgtggacaagagcaggtggcagcaggggaacgtcttctcatgctccgtgatgcatgaggct
ctgcacaaccactacacgcagaagagcctctccctgtctccgggtaaaggtggcggaggatc
tggcggaggtggaagcggcggaggcggatctacagtggaaaagtccgtggtgttcaaggccg
agggcgagcacttcaccgaccagaaaggcaataccatcgtcggctctggcagcggcggcacc
accaagtactttagaatccccgccatgtgcaccaccagcaagggcaccattgtggtgttcgc
cgacgccagacacaacaccgccagcgatcagagcttcatcgataccgctgccgccagaagta
cagacggcggcaagacctggaacaagaagatcgccatctacaacgaccgcgtgaacagcaag
ctgagcagagtgatggaccctacctgcatcgtggccaacatccagggcagagaaaccatcct
ggtcatggtcggaaagtggaacaacaacgataagacctggggcgcctacagagacaaggccc
ctgataccgattgggacctcgtgctgtataagagcaccgacgacggcgtgaccttcagcaag
gtggaaacaaacatccacgacatcgtgaccaagaacggcaccatctctgccatgeteggegg
cgttggatctggcctgcaactgaatgatggcaagctggtgttccccgtgcagatggtccgaa
caaagaacatcaccaccgtgctgaataccagcttcatctactccaccgacggcatcacatgg
tccctgcctagcggctactgtgaaggctttggcagcgagaacaacatcatcgagttcaacgc
cagcctggtcaacaacatccggaacagcggcctgcggagaagcttcgagacaaaggacttcg
gaaagacgtggaccgagtttcctccaatggacaagaaggtggacaaccggaaccacggcgtg
cagggcagcacaatcacaatccctagcggcaacaaactggtggccgctcactctagcgccca
gaacaagaacaacgattacaccagaagcgacatcagcctgtacgcccacaacctgtactccg
gcgaagtgaagctgatcgacgacttctaccccaaagtgggcaatgccagcggagccggctac
agetgtctgagetaccggaaaaatgtggacaaagaaaccctgtacgtggtgtacgaggccaa
cggcagcatcgagtttcaggacctgagcagacatctgcccgtgatcaagagctacaat
SEQ ID NO: 94:
TVEKSVVFKAEGEHFTDQKGNTIVGSGSGGTTKYFRIPAMCTTSKGTIVVFADARHNTASDQ
SFIDTAAARSTDGGKTWNKKIAIYNDRVNSKLSRVMDPTCIVANIQGRETILVMVGKWNNND
KTWGAYRDKAPDTDWDLVLYKSTDDGVTFSKVETNIHDIVTKNGTISAMLGGVGSGLQLNDG
KLVFPVQMVRTKNITTVLNTSFIYSTDGITWSLPSGYCEGFGSENNIIEFNASLVNNIRNSG
LRRSFETKDFGKTWTEFPPMDKKVDNRNHGVQGSTITIPSGNKLVAAHSSAQNKNNDYTRSD
ISLYAHNLYSGEVKLIDDFYPKVGNASGAGYSCLSYRKNVDKETLYVVYEANGSIEFQDLSR
HLPVIKSYNGGGGSGGGGSDKTHTCPPCPAPELLGGPSVFLFPPKPKDTLMISRTPEVTCVV
VDVSHEDPEVKFNWYVDGVEVHNAKTKPREEQYNSTYRVVSVLTVLHQDWLNGKEYKCKVSN
KALPAPIEKTISKAKGQPREPQVYTLPPSREEMTKNQVSLTCLVKGFYPSDIAVEWESNGQP
ENNYKTTPPVLDSDGSFFLYSKLTVDKSRWQQGNVFSCSVMHEALHNHYTQKSLSLSPGKGG
GGSGGGGSGGGGSEVQLVESGGGLVQPGGSLRLSCAASGFNIKDTYIHWVRQAPGKGLEWVA
RIYPTNGYTRYADSVKGRFTISADTSKNTAYLQMNSLRAEDTAVYYCSRWGGDGFYAMDYWG
QGTLVTVSSGGGGSGGGGSGGGGSDIQMTQSPSSLSASVGDRVTITCRASQDVNTAVAWYQQ
KPGKAPKLLIYSASFLYSGVPSRFSGSRSGTDFTLTISSLQPEDFATYYCQQHYTTPPTFGQ
GTKVEIK
SEQ ID NO: 95:
ACAGTGGAAAAGTCCGTGGTGTTCAAGGCCGAGGGCGAGCACTTCACCGACCAGAAAGGCAA
TACCATCGTCGGCTCTGGCAGCGGCGGCACCACCAAGTACTTTAGAATCCCCGCCATGTGCA
CCACCAGCAAGGGCACCATTGTGGTGTTCGCCGACGCCAGACACAACACCGCCAGCGATCAG
AGCTTCATCGATACCGCTGCCGCCAGATCTACCGATGGCGGCAAGACCTGGAACAAGAAGAT
CGCCATCTACAACGACCGCGTGAACAGCAAGCTGAGCAGAGTGATGGACCCTACCTGCATCG
TGGCCAACATCCAGGGCAGAGAAACCATCCTGGTCATGGTCGGAAAGTGGAACAACAACGAT
AAGACCTGGGGCGCCTACAGAGACAAGGCCCCTGATACCGATTGGGACCTCGTGCTGTACAA
GAGCACCGATGACGGCGTGACCTTCAGCAAGGTGGAAACAAACATCCACGACATCGTGACCA
AGAACGGCACCATCTCTGCCATGCTCGGCGGCGTTGGATCTGGCCTGCAACTGAATGATGGC
AAGCTGGTGTTCCCCGTGCAGATGGTCCGAACAAAGAATATCACCACCGTGCTGAATACCAG
CTTCATCTACAGCACCGACGGCATCACATGGTCCCTGCCTAGCGGCTACTGTGAAGGCTTTG
GCAGCGAGAACAACATCATCGAGTTCAACGCCAGCCTGGTCAACAACATCCGGAACAGCGGC
CTGCGGAGAAGCTTCGAGACAAAGGACTTCGGAAAGACGTGGACCGAGTTTCCTCCAATGGA
CAAGAAGGTGGACAACCGGAACCACGGCGTGCAGGGCAGCACAATCACAATCCCTAGCGGCA
ACAAACTGGTGGCCGCTCACTCTAGCGCCCAGAACAAGAACAACGACTACACCAGAAGCGAC
ATCAGCCTGTACGCCCACAACCTGTACAGCGGCGAAGTGAAGCTGATCGACGACTTCTACCC
CAAAGTGGGCAATGCCAGCGGAGCCGGCTACAGCTGTCTGAGCTACCGGAAAAATGTGGACA
AAGAAACCCTGTACGTGGTGTACGAGGCCAACGGCAGCATCGAGTTTCAGGACCTGAGCAGA
CATCTGCCCGTGATCAAGAGCTACAACGGCGGAGGTGGAAGTGGCGGAGGCGGATCcGACAA
AACTCACACATGCCCACCGTGCCCAGCACCTGAACTCCTGGGGGGACCGTCAGTCTTCCTCT
TCCCCCCAAAACCCAAGGACACCCTCATGATCTCCCGGACCCCTGAGGTCACATGCGTGGTG
GTGGACGTGAGCCACGAAGACCCTGAGGTCAAGTTCAACTGGTACGTGGACGGCGTGGAGGT
GCATAATGCCAAGACAAAGCCGCGGGAGGAGCAGTACAACAGCACGTACCGTGTGGTCAGCG
TCCTCACCGTCCTGCACCAGGACTGGCTGAATGGCAAGGAGTACAAGTGCAAGGTCTCCAAC
AAAGCCCTCCCAGCCCCCATCGAGAAAACCATCTCCAAAGCCAAAGGGCAGCCCCGAGAACC
ACAGGTcTACACCCTGCCCCCATCCCGGGAGGAGATGACCAAGAACCAGGTCAGCCTGACCT
GCCTGGTCAAAGGCTTCTATCCCAGCGACATCGCCGTGGAGTGGGAGAGCAATGGGCAGCCG
GAGAACAACTACAAGACCACGCCTCCCGTGCTGGACTCCGACGGCTCCTTCTTCCTCTATAG
CAAGCTCACCGTGGACAAGAGCAGGTGGCAGCAGGGGAACGTCTTCTCATGCTCCGTGATGC
ATGAGGCTCTGCACAACCACTACACGCAGAAGAGCCTCTCCCTGTCTCCGGGTAAAGGAGGC
GGAGGATCTGGCGGAGGTGGAAGTGGCGGAGGCGGATCTGAGGTGCAGCTGGTTGAATCTGG
CGGAGGACTGGTTCAGCCTGGCGGATCTCTGAGACTGTCTTGTGCCGCCAGCGGCTTCAACA
TCAAGGACACCTACATCCACTGGGTCCGACAGGCCCCTGGCAAAGGACTTGAATGGGTCGCC
AGAATCTACCCCACCAACGGCTACACCAGATACGCCGACTCTGTGAAGGGCAGATTCACCAT
CAGCGCCGACACCAGCAAGAACACCGCCTACCTGCAGATGAACAGCCTGAGAGCCGAGGACA
CCGCCGTGTACTACTGTTCTAGATGGGGAGGCGACGGCTTCTACGCCATGGATTATTGGGGC
CAGGGCACCCTGGTCACCGTTTCTTCTGGCGGAGGAGGATCTGGCGGAGGCGGAAGTGGCGG
AGGCGGATCTGACATCCAGATGACACAGAGCCCTAGCAGCCTGTCTGCCAGCGTGGGAGACA
GAGTGACCATCACCTGTAGAGCCAGCCAGGACGTGAACACAGCCGTGGCTTGGTATCAGCAG
AAGCCTGGCAAGGCCCCTAAGCTGCTGATCTACAGCGCCAGCTTTCTGTACTCCGGCGTGCC
CAGCAGATTCAGCGGCTCTAGAAGCGGCACCGACTTCACCCTGACCATAAGCAGTCTGCAGC
CCGAGGACTTCGCCACCTACTACTGTCAGCAGCACTACACCACACCTCCAACCTTTGGCCAG
GGCACCAAGGTGGAAATCAAG
SEQ ID NO: 96:
TVEKSVVFKAEGEHFTDQKGNTIVGSGSGGTTKYFRIPAMCTTSKGTIVVFADARHNTASDQ
SFIDTAAARSTDGGKTWNKKIAIYNDRVNSKLSRVMVPTCIVANIQGRETILVMVGKWNNND
KTWGAYRDKAPDTDWDLVLYKSTDDGVTFSKVETNIHDIVTKNGTISAMLGGVGSGLQLNDG
KLVFPVQMVRTKNITTVLNTSFIYSTDGITWSLPSGYCEGFGSVNNIIEFNASLVNNIRNSG
LRRSFETKDFGKTWTEFPPMDKKVDNRNHGVQGSTITIPSGNKLVAAHSSAQNKNNDYTRSD
ISLYAHNLYSGEVKLIDDFYPKVGNASGAGYSCLSYRKNVDKETLYVVYEANGSIEFQDLSR
HLPVIKSYNGGGGSGGGGSDKTHTCPPCPAPELLGGPSVFLFPPKPKDTLMISRTPEVTCVV
VDVSHEDPEVKFNWYVDGVEVHNAKTKPREEQYNSTYRVVSVLTVLHQDWLNGKEYKCKVSN
KALPAPIEKTISKAKGQPREPQVYTLPPSREEMTKNQVSLTCLVKGFYPSDIAVEWESNGQP
ENNYKTTPPVLDSDGSFFLTSKLTVDKSRWQQGNVFSCSVMHEALHNHYTQKSLSLSPGK
SEQ ID NO: 97:
acagtggaaaagtccgtggtgttcaaggccgagggcgagcacttcaccgaccagaaaggcaa
taccatcgtcggctctggcagcggcggcaccaccaagtactttagaatccccgccatgtgca
ccaccagcaagggcaccattgtggtgttcgccgacgccagacacaacaccgccagcgatcag
agcttcatcgataccgctgccgccagaagtacagacggcggcaagacctggaacaagaagat
cgccatctacaacgaccgcgtgaacagcaagctgagcagagtgatggtccctacctgcatcg
tggccaacatccagggcagagaaaccatcctggtcatggtcggaaagtggaacaacaacgat
aagacctggggcgcctacagagacaaggcccctgataccgattgggacctcgtgctgtataa
gagcaccgacgacggcgtgaccttcagcaaggtggaaacaaacatccacgacatcgtgacca
agaacggcaccatctctgccatgctcggcggcgttggatctggcctgcaactgaatgatggc
aagctggtgttccccgtgcagatggtccgaacaaagaacatcaccaccgtgctgaataccag
cttcatctactccaccgacggcatcacatggtccctgcctagcggctactgtgaaggctttg
gcagcgtgaacaacatcatcgagttcaacgccagcctggtcaacaacatccggaacagcggc
ctgcggagaagcttcgagacaaaggacttcggaaagacgtggaccgagtttcctccaatgga
caagaaggtggacaaccggaaccacggcgtgcagggcagcacaatcacaatccctagcggca
acaaactggtggccgctcactctagcgcccagaacaagaacaacgattacaccagaagcgac
atcagcctgtacgcccacaacctgtactccggcgaagtgaagctgatcgacgacttctaccc
caaagtgggcaatgccagcggagccggctacagctgtctgagctaccggaaaaatgtggaca
aagaaaccctgtacgtggtgtacgaggccaacggcagcatcgagtttcaggacctgagcaga
catctgcccgtgatcaagagctacaatggcggaggtggaagtggcggaggcggatccgacaa
aactcacacatgcccaccgtgcccagcacctgaactcctggggggaccgtcagtcttcctct
tccccccaaaacccaaggacaccctcatgatctcccggacccctgaggtcacatgcgtggtg
gtggacgtgagccacgaagaccctgaggtcaagttcaactggtacgtggacggcgtggaggt
gcataatgccaagacaaagccgcgggaggagcagtacaacagcacgtaccgtgtggtcagcg
tcctcaccgtcctgcaccaggactggctgaatggcaaggagtacaagtgcaaggtctccaac
aaagccctcccagcccccatcgagaaaaccatctccaaagccaaagggcagccccgagaacc
acaggtctacaccctgcccccatcccgggaggagatgaccaagaaccaggtcagcctgacct
gcctggtcaaaggcttctatcccagcgacatcgccgtggagtgggagagcaatgggcagccg
gagaacaactacaagaccacgcctcccgtgctggactccgacggctccttcttcctcactag
caagctcaccgtggacaagagcaggtggcagcaggggaacgtcttctcatgctccgtgatgc
atgaggctctgcacaaccactacacgcagaagagcctctccctgtctccgggtaaa
SEQ ID NO: 98:
DASLPYLQKESVFQSGAHAYRIPALLYLPGQQSLLAFAEQRASKKDEHAELIVLRRGDYDAG
THQVQWQAQEVVAQARLDGHRSMNPCPLYDEQTGTLFLFFIAIPGQVTEQQQLQTRANVTRL
CQVTSTDHGRTWSSPRDLTDAAIGPAYREWSTFAVGPGHCLQLHDRARSLVVPAYAYRKLHP
KQRPIPSAFCFLSHDHGRTWARGHFVAQDTLECQVAEVETGEQRVVTLNARSHLRARVQAQS
TNDGLDFQESQLVKKLVEPPPQGCQGSVISFPSPRSGPGSPAQWLLYTHPTHSWQRADLGAY
LNPRPPAPEAWSEPVLLAKGSAAYSDLQSMGTGPDGSPLFGCLYEANDYEEIVFLMFTLKQA
FPAEYLPQEPKSSDKTHTCPPCPAPELLGGPSVFLFPPKPKDTLMISRTPEVTCVVVDVSHE
DPEVKFNWYVDGVEVHNAKTKPREEQYNSTYRVVSVLTVLHQDWLNGKEYKCKVSNKALPAP
IEKTISKAKGQPREPQVYTLPPSREEMTKNQVSLTCLVKGFYPSDIAVEWESNGQPENNYKT
TPPVLDSDGSFFLTSKLTVDKSRWQQGNVFSCSVMHEALHNHYTQKSLSLSPGK
SEQ ID NO: 99:
DASLPYLQDESVFQSGAHAYRIPALLYLPGQQSLLAFAEQRASKKDEHAELIVLRRGDYDAP
THQVQWQAQEVVAQARLDGHRSMNPCPLYDEQTGTLFLFFIAIPGQVTEQQQLQTRANVTRL
CQVTSTDHGRTWSSPRDLTDAAIGPAYREWSTFAVGPGHCLQLHDRARSLVVPAYAYRKLHP
KQRPIPSAFCFLSHDHGRTWARGHFVAQDTLECQVAEVETGEQRVVTLNARSHLRARVQAQS
TNDGLDFQESQLVKKLVEPPPQGCQGSVISFPSPRSGPGSPAQWLLYTHPTHSWQRADLGAY
LNPRPPAPEAWSEPVLLAKGSAAYSDLQSMGTGPDGSPLFGCLYEANDYEEIRFIMFTLKQA
FPAEYLPQEPKSSDKTHTCPPCPAPELLGGPSVFLFPPKPKDTLMISRTPEVTCVVVDVSHE
DPEVKFNWYVDGVEVHNAKTKPREEQYNSTYRVVSVLTVLHQDWLNGKEYKCKVSNKALPAP
IEKTISKAKGQPREPQVYTLPPSREEMTKNQVSLTCLVKGFYPSDIAVEWESNGQPENNYKT
TPPVLDSDGSFFLTSKLTVDKSRWQQGNVFSCSVMHEALHNHYTQKSLSLSPGK
SEQ ID NO: 100:
DASLPYLQKESVFQSGAHAYRIPALLYLPGQQSLLAFAEQRASKKDEHAELIVLRRGDYDAN
THQVQWQAQEVVAQARLDGHRSMNPCPLYDAQTGTLFLFFIAIPGQVTEQQQLQTRANVTRL
CQVTSTDHGRTWSSPRDLTDAAIGPAYREWSTFAVGPGHCLQLHDRARSLVVPAYAYRKLHP
KQRPIPSAFCFLSHDHGRTWARGHFVAQDTLECQVAEVETGEQRVVTLNARSHLRARVQAQS
TNDGLDFQESQLVKKLVEPPPQGCQGSVISFPSPRSGPGSPAQWLLYTHPTHSWQRADLGAY
LNPRPPAPEAWSEPVLLAKGSAAYSDLQSMGTGPDGSPLFGCLYEANDYEEIVFLMFTLKQA
FPAEYLPQEPKSSDKTHTCPPCPAPELLGGPSVFLFPPKPKDTLMISRTPEVTCVVVDVSHE
DPEVKFNWYVDGVEVHNAKTKPREEQYNSTYRVVSVLTVLHQDWLNGKEYKCKVSNKALPAP
IEKTISKAKGQPREPQVYTLPPSREEMTKNQVSLTCLVKGFYPSDIAVEWESNGQPENNYKT
TPPVLDSDGSFFLTSKLTVDKSRWQQGNVFSCSVMHEALHNHYTQKSLSLSPGK
SEQ ID NO: 101:
DASLPYLQKESVFQSGAHAYRIPALLYLPGQQSLLAFAEQRASKKDEHAELIVLRRGDYDAP
THQVQWQAQEVVAQARLDGHRSMNPCPLYDAQTGTLFLFFIAIPGQVTEQQQLQTRANVTRL
CQVTSTDHGRTWSSPRDLTDAAIGPAYREWSTFAVGPGHCLQLHDRARSLVVPAYAYRKLHP
KQRPIPSAFCFLSHDHGRTWARGHFVAQDTLECQVAEVETGEQRVVTLNARSHLRARVQAQS
TNDGLDFQESQLVKKLVEPPPAGCQGSVISFPSPRSGPGSPAQWLLYTHPTHRKQRADLGAY
LNPRPPAPEAWSEPVLLAKGSAAYSDLQSMGTGPDGSPLFGCLYEANDYEEIVFLMFTLKQA
FPAEYLPQEPKSSDKTHTCPPCPAPELLGGPSVFLFPPKPKDTLMISRTPEVTCVVVDVSHE
DPEVKFNWYVDGVEVHNAKTKPREEQYNSTYRVVSVLTVLHQDWLNGKEYKCKVSNKALPAP
IEKTISKAKGQPREPQVYTLPPSREEMTKNQVSLTCLVKGFYPSDIAVEWESNGQPENNYKT
TPPVLDSDGSFFLTSKLTVDKSRWQQGNVFSCSVMHEALHNHYTQKSLSLSPGK
SEQ ID NO: 102:
DASLPYLQKESVFQSGAHAYRIPALLYLPGQQSLLAFAEQRASKKDEHAELIVLRRGDYDAS
THQVQWQAQEVVAQARLDGHRSMNPCPLYDAQTGTLFLFFIAIPGQVTEQQQLQTRANVTRL
CQVTSTDHGRTWSSPRDLTDAAIGPAYREWSTFAVGPGHCLQLHDRARSLVVPAYAYRKLHP
KQRPIPSAFCFLSHDHGRTWARGHFVAQDTLECQVAEVETGEQRVVTLNARSHLRARVQAQS
TNDGLDFQESQLVKKLVEPPPAGCQGSVISFPSPRSGPGSPAQWLLYTHPTHRKQRADLGAY
LNPRPPAPEAWSEPVLLAKGSAAYSDLQSMGTGPDGSPLFGCLYEANDYEEIVFLMFTLKQA
FPAEYLPQEPKSSDKTHTCPPCPAPELLGGPSVFLFPPKPKDTLMISRTPEVTCVVVDVSHE
DPEVKFNWYVDGVEVHNAKTKPREEQYNSTYRVVSVLTVLHQDWLNGKEYKCKVSNKALPAP
IEKTISKAKGQPREPQVYTLPPSREEMTKNQVSLTCLVKGFYPSDIAVEWESNGQPENNYKT
TPPVLDSDGSFFLTSKLTVDKSRWQQGNVFSCSVMHEALHNHYTQKSLSLSPGK
SEQ ID NO: 103:
DASLPYLQKESVFQSGAHAYRIPALLYLPGQQSLLAFAEQRASKKDEHAELIVLRRGDYDAT
THQVQWQAQEVVAQARLDGHRSMNPCPLYDAQTGTLFLFFIAIPGQVTEQQQLQTRANVTRL
CQVTSTDHGRTWSSPRDLTDAAIGPAYREWSTFAVGPGHCLQLHDRARSLVVPAYAYRKLHP
KQRPIPSAFCFLSHDHGRTWARGHFVAQDTLECQVAEVETGEQRVVTLNARSHLRARVQAQS
TNDGLDFQESQLVKKLVEPPPAGCQGSVISFPSPRSGPGSPAQWLLYTHPTHRKQRADLGAY
LNPRPPAPEAWSEPVLLAKGSAAYSDLQSMGTGPDGSPLFGCLYEANDYEEIVFLMFTLKQA
FPAEYLPQEPKSSDKTHTCPPCPAPELLGGPSVFLFPPKPKDTLMISRTPEVTCVVVDVSHE
DPEVKFNWYVDGVEVHNAKTKPREEQYNSTYRVVSVLTVLHQDWLNGKEYKCKVSNKALPAP
IEKTISKAKGQPREPQVYTLPPSREEMTKNQVSLTCLVKGFYPSDIAVEWESNGQPENNYKT
TPPVLDSDGSFFLTSKLTVDKSRWQQGNVFSCSVMHEALHNHYTQKSLSLSPGK
SEQ ID NO: 104:
DASLPYLQKESVFQSGAHAYRIPALLYLPGQQSLLAFAEQRASKKDEHAELIVLRRGDYDAN
THQVQWQAQEVVAQARLDGHRSMNPCPLYDAQTGTLFLFFIAIPGQVTEQQQLQTRANVTRL
CQVTSTDHGRTWSSPRDLTDAAIGPAYREWSTFAVGPGHCLQLHDRARSLVVPAYAYRKLHP
KQRPIPSAFCFLSHDHGRTWARGHFVAQDTLECQVAEVETGEQRVVTLNARSHLRARVQAQS
TNDGLDFQESQLVKKLVEPPPAGCQGSVISFPSPRSGPGSPAQWLLYTHPTHRKQRADLGAY
LNPRPPAPEAWSEPVLLAKGSAAYSDLQSMGTGPDGSPLFGCLYEANDYEEIVFLMFTLKQA
FPAEYLPQEPKSSDKTHTCPPCPAPELLGGPSVFLFPPKPKDTLMISRTPEVTCVVVDVSHE
DPEVKFNWYVDGVEVHNAKTKPREEQYNSTYRVVSVLTVLHQDWLNGKEYKCKVSNKALPAP
IEKTISKAKGQPREPQVYTLPPSREEMTKNQVSLTCLVKGFYPSDIAVEWESNGQPENNYKT
TPPVLDSDGSFFLTSKLTVDKSRWQQGNVFSCSVMHEALHNHYTQKSLSLSPGK
SEQ ID NO: 105:
X₁ASLPX₂LQX₃ESVFQSGAHAYRIPALLYLPGQQSLLAFAEQRASKKDEHAELIVLRRGDYD
AX₄THQVQWQAQEVVAQARLDGHRSMNPCPLYDX₅QTGTLFLFFIAIPGQVTEQQQLQTRANV
TRLCQVTSTDHGRTWSSPRDLTDAAIGPAYREWSTFAVGPGHCLQLHDRARSLVVPAYAYRK
LHPX₆QRPIPSAFCFLSHDHGRTWARGHFVAQDTLECQVAEVETGEQRVVTLNARSHLRARVQ
AQSTNDGLDFQESQLVKKLVEPPPX₇GCQGSVISFPSPRSGPGSPAQWLLYTHPTHX₈X₉QRA
DLGAYLNPRPPAPEAWSEPVLLAKGSX₁₀AYSDLQSMGTGPDGSPLFGCLYEANDYEEIX₁₁F
X₁₂MFTLKQAFPAEYLPQX₁₃DKTHTCPPCPAPELLGGPSVFLFPPKPKDTLMISRTPEVTCVV
VDVSHEDPEVKFNWYVDGVEVHNAKTKPREEQYNSTYRWSVLTVLHQDWLNGKEYKCKVSNK
ALPAPIEKTISKAKGQPREPQVYTLPPSREEMTKNQVSLTCLVKGFYPSDIAVEWESNGQPE
NNYKTTPPVLDSDGSFFLTSKLTVDKSRWQQGNVFSCSVMHEALHNHYTQKSLSLSPGK
SEQ ID NO: 106:
X₁X₂SX₃X₄X₅LQX₆ESVFQSGAHAYRIPALLYLPGQQSLLAFAEQRASX₇X₈DEHAELIVX₉RR
GDYDAX₁₀THQVQWX₁₁AQEVVAQAX₁₂LDGHRSMNPCPLYDX₁₃QTGTLFLFFIAIPX₁₄X₁₅VT
EX₁₆QQLQTRANVTRLX₁₇X₁₈VTSTDHGRTWSSPRDLTDAAIGPX₁₉YREWSTFAVGPGHX₂₀LQ
LHDRX₂₁RSLVVPAYAYRKLHPX₂₂QRPIPSAFX₂₃FLSHDHGRTWARGHFVAQDTX₂₄ECQVAE
VETGEQRVVTLNARSHLRARVQAQSX₂₅NX₂₆GLDFQX₂₇SQLVKKLVEPPPX₂₈GX₂₉QGSVISF
PSPRSGPGSPAQX₃₀LLYTHPTHX₃₁X₃₂QRADLGAYLNPRPPAPEAWSEPX₃₃LLAKGSX₃₄AYS
DLQSMGTGPDGSPLFGX₃₅LYEANDYEEIX₃₆FX₃₇MFTLKQAFPAEYLPQX₃₈DKTHTCPPCPA
PELLGGPSVFLFPPKPKDTLMISRTPEVTCVVVDVSHEDPEVKFNWYVDGVEVHNAKTKPRE
EQYNSTYRVVSVLTVLHQDWLNGKEYKCKVSNKALPAPIEKTISKAKGQPREPQVYTLPPSR
EEMTKNQVSLTCLVKGFYPSDIAVEWESNGQPENNYKTTPPVLDSDGSFFLTSKLTVDKSRW
QQGNVFSCSVMHEALHNHYTQKSLSLSPGK
SEQ ID NO: 107:
GGGGSGGGGS
SEQ ID NO: 108:
EPKSS
SEQ ID NO: 109:
EPKSCDKTHTCPPCPAPELLGGPSVFLFPPKPKDTLMISRTPEVTCVVVDVSHEDPEVKFNW
YVDGVEVHNAKTKPREEQYNSTYRVVSVLTVLHQDWLNGKEYKCKVSNKALPAPIEKTISKA
KGQPREPQVYTLPPSREEMTKNQVSLTCLVKGFYPSDIAVEWESNGQPENNYKTTPPVLDSD
GSFFLTSKLTVDKSRWQQGNVFSCSVMHEALHNHYTQKSLSLSPGK
SEQ ID NO: 110:
DKTHTCPPCPAPELLGGPSVFLFPPKPKDTLMISRTPEVTCVVVDVSHEDPEVKFNWYVDGV
EVHNAKTKPREEQYNSTYRVVSVLTVLHQDWLNGKEYKCKVSNKALPAPIEKTISKAKGQPR
EPQVYTLPPSREEMTKNQVSLYCLVKGFYPSDIAVEWESNGQPENNYKTTPPVLDSDGSFFL
YSKLTVDKSRWQQGNVFSCSVMHEALHNHYTQKSLSLSPGK
SEQ ID NO: 111:
DASLPYLQKESVFQSGAHAYRIPALLYLPGQQSLLAFAEQRASKKDEHAELIVLRRGDYDAG
THQVQWQAQEVVAQARLDGHRSMNPCPLYDEQTGTLFLFFIAIPGQVTEQQQLQTRANVTRL
CQVTSTDHGRTWSSPRDLTDAAIGPAYREWSTFAVGPGHCLQLHDRARSLVVPAYAYRKLHP
KQRPIPSAFCFLSHDHGRTWARGHFVAQDTLECQVAEVETGEQRVVTLNARSHLRARVQAQS
TNDGLDFQESQLVKKLVEPPPQGCQGSVISFPSPRSGPGSPAQWLLYTHPTHARQRADLGAY
LNPRPPAPEAWSEPVLLAKGSAAYSDLQSMGTGPDGSPLFGCLYEANDYEEIVFLMFTLKQA
FPAEYLPQ
SEQ ID NO: 112:
DASLPYLQKESVFQSGAHAYRIPALLYLPGQQSLLAFAEQRASKKDEHAELIVLRRGDYDAG
THQVQWQAQEVVAQARLDGHRSMNPCPLYDEQTGTLFLFFIAIPGQVTEQQQLQTRANVTRL
CQVTSTDHGRTWSSPRDLTDAAIGPAYREWSTFAVGPGHCLQLHDRARSLVVPAYAYRKLHP
KQRPIPSAFCFLSHDHGRTWARGHFVAQDTLECQVAEVETGEQRVVTLNARSHLRARVQAQS
TNDGLDFQESQLVKKLVEPPPQGCQGSVISFPSPRSGPGSPAQWLLYTHPTHARQRADLGAY
LNPRPPAPEAWSEPVLLAKGSAAYSDLQSMGTGPDGSPLFGCLYEANDYEEIVFLMFTLKQA
FPAEYLPQGGGGSGGGGSDKTHTCPPCPAPELLGGPSVFLFPPKPKDTLMISRTPEVTCVVV
DVSHEDPEVKFNWYVDGVEVHNAKTKPREEQYNSTYRVVSVLTVLHQDWLNGKEYKCKVSNK
ALPAPIEKTISKAKGQPREPQVYTLPPSREEMTKNQVSLTCLVKGFYPSDIAVEWESNGQPE
NNYKTTPPVLDSDGSFFLTSKLTVDKSRWQQGNVFSCSVMHEALHNHYTQKSLSLSPGK
SEQ ID NO: 113:
DASLPYLQKESVFQSGAHAYRIPALLYLPGQQSLLAFAEQRASKKDEHAELIVLRRGDYDAG
THQVQWQAQEVVAQARLDGHRSMNPCPLYDEQTGTLFLFFIAIPGQVTEQQQLQTRANVTRL
CQVTSTDHGRTWSSPRDLTDAAIGPAYREWSTFAVGPGHCLQLHDRARSLVVPAYAYRKLHP
KQRPIPSAFCFLSHDHGRTWARGHFVAQDTLECQVAEVETGEQRVVTLNARSHLRARVQAQS
TNDGLDFQESQLVKKLVEPPPQGCQGSVISFPSPRSGPGSPAQWLLYTHPTHARQRADLGAY
LNPRPPAPEAWSEPVLLAKGSAAYSDLQSMGTGPDGSPLFGCLYEANDYEEIVFLMFTLKQA
FPAEYLPQEPKSSDKTHTCPPCPAPELLGGPSVFLFPPKPKDTLMISRTPEVTCVVVDVSHE
DPEVKFNWYVDGVEVHNAKTKPREEQYNSTYRVVSVLTVLHQDWLNGKEYKCKVSNKALPAP
IEKTISKAKGQPREPQVYTLPPSREEMTKNQVSLTCLVKGFYPSDIAVEWESNGQPENNYKT
TPPVLDSDGSFFLTSKLTVDKSRWQQGNVFSCSVMHEALHNHYTQKSLSLSPGK
SEQ ID NO: 114:
DASLPYLQKESVFQSGAHAYRIPALLYLPGQQSLLAFAEQRASKKDEHAELIVLRRGDYDAG
THQVQWQAQEVVAQARLDGHRSMNPCPLYDEQTGTLFLFFIAIPGQVTEQQQLQTRANVTRL
CYVTSTDHGRTWSSPRDLTDAAIGPAYREWSTFAVGPGHCLQLHDRARSLVVPAYAYRKLHP
KQRPIPSAFCFLSHDHGRTWARGHFVAQDTLECQVAEVETGEQRVVTLNARSHLRARVQAQS
TNDGLDFQESQLVKKLVEPPPTGCQGSVISFPSPRSGPGSPAQWLLYTHPTHSWQRADLGAY
LNPRPPAPEAWSEPVLLAKGSAAYSDLQSMGTGPDGSPLFGCLYEANDYEEIVFLMFTLKQA
FPAEYLPQ
SEQ ID NO: 115:
DASLPYLQKESVFQSGAHAYRIPALLYLPGQQSLLAFAEQRASKKDEHAELIVLRRGDYDAG
THQVQWQAQEVVAQARLDGHRSMNPCPLYDEQTGTLFLFFIAIPGQVTEQQQLQTRANVTRL
CYVTSTDHGRTWSSPRDLTDAAIGPAYREWSTFAVGPGHCLQLHDRARSLVVPAYAYRKLHP
KQRPIPSAFCFLSHDHGRTWARGHFVAQDTLECQVAEVETGEQRVVTLNARSHLRARVQAQS
TNDGLDFQESQLVKKLVEPPPTGCQGSVISFPSPRSGPGSPAQWLLYTHPTHSWQRADLGAY
LNPRPPAPEAWSEPVLLAKGSAAYSDLQSMGTGPDGSPLFGCLYEANDYEEIVFLMFTLKQA
FPAEYLPQGGGGSGGGGSDKTHTCPPCPAPELLGGPSVFLFPPKPKDTLMISRTPEVTCVVV
DVSHEDPEVKFNWYVDGVEVHNAKTKPREEQYNSTYRVVSVLTVLHQDWLNGKEYKCKVSNK
ALPAPIEKTISKAKGQPREPQVYTLPPSREEMTKNQVSLTCLVKGFYPSDIAVEWESNGQPE
NNYKTTPPVLDSDGSFFLTSKLTVDKSRWQQGNVFSCSVMHEALHNHYTQKSLSLSPGK
SEQ ID NO: 116:
DASLPYLQKESVFQSGAHAYRIPALLYLPGQQSLLAFAEQRASKKDEHAELIVLRRGDYDAG
THQVQWQAQEVVAQARLDGHRSMNPCPLYDEQTGTLFLFFIAIPGQVTEQQQLQTRANVTRL
CYVTSTDHGRTWSSPRDLTDAAIGPAYREWSTFAVGPGHCLQLHDRARSLVVPAYAYRKLHP
KQRPIPSAFCFLSHDHGRTWARGHFVAQDTLECQVAEVETGEQRVVTLNARSHLRARVQAQS
TNDGLDFQESQLVKKLVEPPPTGCQGSVISFPSPRSGPGSPAQWLLYTHPTHSWQRADLGAY
LNPRPPAPEAWSEPVLLAKGSAAYSDLQSMGTGPDGSPLFGCLYEANDYEEIVFLMFTLKQA
FPAEYLPQEPKSSDKTHTCPPCPAPELLGGPSVFLFPPKPKDTLMISRTPEVTCVVVDVSHE
DPEVKFNWYVDGVEVHNAKTKPREEQYNSTYRVVSVLTVLHQDWLNGKEYKCKVSNKALPAP
IEKTISKAKGQPREPQVYTLPPSREEMTKNQVSLTCLVKGFYPSDIAVEWESNGQPENNYKT
TPPVLDSDGSFFLTSKLTVDKSRWQQGNVFSCSVMHEALHNHYTQKSLSLSPGK
SEQ ID NO: 117:
DASLPYLQKESVFQSGAHAYRIPALLYLPGQQSLLAFAEQRASKKDEHAELIVLRRGDYDAG
THQVQWQAQEVVAQARLDGHRSMNPCPLYDEQTGTLFLFFIAIPGQVTEQQQLQTRANVTRL
CYVTSTDHGRTWSSPRDLTDAAIGPAYREWSTFAVGPGHCLQLHDRARSLVVPAYAYRKLHP
KQRPIPSAFCFLSHDHGRTWARGHFVAQDTLECQVAEVETGEQRVVTLNARSHLRFRVQAQS
TNDGLDFQESQLVKKLVEPPPTGCQGSVISFPSPRSGPGSPAQWLLYTHPTHSWQRADLGAY
LNPRPPAPEAWSEPVLLAKGSAAYSDLQSMGTGPDGSPLFGCLYEANDYEEIVFLMFTLKQA
FPAEYLPQ
SEQ ID NO: 118:
DASLPYLQKESVFQSGAHAYRIPALLYLPGQQSLLAFAEQRASKKDEHAELIVLRRGDYDAG
THQVQWQAQEVVAQARLDGHRSMNPCPLYDEQTGTLFLFFIAIPGQVTEQQQLQTRANVTRL
CYVTSTDHGRTWSSPRDLTDAAIGPAYREWSTFAVGPGHCLQLHDRARSLVVPAYAYRKLHP
KQRPIPSAFCFLSHDHGRTWARGHFVAQDTLECQVAEVETGEQRVVTLNARSHLRFRVQAQS
TNDGLDFQESQLVKKLVEPPPTGCQGSVISFPSPRSGPGSPAQWLLYTHPTHSWQRADLGAY
LNPRPPAPEAWSEPVLLAKGSAAYSDLQSMGTGPDGSPLFGCLYEANDYEEIVFLMFTLKQA
FPAEYLPQGGGGSGGGGSDKTHTCPPCPAPELLGGPSVFLFPPKPKDTLMISRTPEVTCVVV
DVSHEDPEVKFNWYVDGVEVHNAKTKPREEQYNSTYRVVSVLTVLHQDWLNGKEYKCKVSNK
ALPAPIEKTISKAKGQPREPQVYTLPPSREEMTKNQVSLTCLVKGFYPSDIAVEWESNGQPE
NNYKTTPPVLDSDGSFFLTSKLTVDKSRWQQGNVFSCSVMHEALHNHYTQKSLSLSPGK
SEQ ID NO: 119:
DASLPYLQKESVFQSGAHAYRIPALLYLPGQQSLLAFAEQRASKKDEHAELIVLRRGDYDAG
THQVQWQAQEVVAQARLDGHRSMNPCPLYDEQTGTLFLFFIAIPGQVTEQQQLQTRANVTRL
CYVTSTDHGRTWSSPRDLTDAAIGPAYREWSTFAVGPGHCLQLHDRARSLVVPAYAYRKLHP
KQRPIPSAFCFLSHDHGRTWARGHFVAQDTLECQVAEVETGEQRVVTLNARSHLRFRVQAQS
TNDGLDFQESQLVKKLVEPPPTGCQGSVISFPSPRSGPGSPAQWLLYTHPTHSWQRADLGAY
LNPRPPAPEAWSEPVLLAKGSAAYSDLQSMGTGPDGSPLFGCLYEANDYEEIVFLMFTLKQA
FPAEYLPQEPKSSDKTHTCPPCPAPELLGGPSVFLFPPKPKDTLMISRTPEVTCVVVDVSHE
DPEVKFNWYVDGVEVHNAKTKPREEQYNSTYRVVSVLTVLHQDWLNGKEYKCKVSNKALPAP
IEKTISKAKGQPREPQVYTLPPSREEMTKNQVSLTCLVKGFYPSDIAVEWESNGQPENNYKT
TPPVLDSDGSFFLTSKLTVDKSRWQQGNVFSCSVMHEALHNHYTQKSLSLSPGK
SEQ ID NO: 120:
X₁ASLPX₂LQX₃ESVFQSGAHAYRIPALLYLPGQQSLLAFAEQRASKKDEHAELIVLRRGDYD
AX₄THQVQWQAQEVVAQARLDGHRSMNPCPLYDX₅QTGTLFLFFIAIPGQVTEQQQLQTRANV
TRLCX₆VTSTDHGRTWSSPRDLTDAAIGPAYREWSTFAVGPGHCLQLHDRARSLVVPAYAYRK
LHPX₇QRPIPSAFCFLSHDHGRTWARGHFVAQDTLECQVAEVETGEQRVVTLNARSHLRX₈RV
QAQSTNDGLDFQESQLVKKLVEPPPX₉GCQGSVISFPSPRSGPGSPAQWLLYTHPTHX₁₀X₁₁Q
RADLGAYLNPRPPAPEAWSEPVLLAKGSX₁₂AYSDLQSMGTGPDGSPLFGCLYEANDYEEIX₁₃
FX₁₄MFTLKQAFPAEYLPQX₁₅DKTHTCPPCPAPELLGGPSVFLFPPKPKDTLMISRTPEVTCV
VVDVSHEDPEVKFNWYVDGVEVHNAKTKPREEQYNSTYRVVSVLTVLHQDWLNGKEYKCKVS
NKALPAPIEKTISKAKGQPREPQVYTLPPSREEMTKNQVSLTCLVKGFYPSDIAVEWESNGQ
PENNYKTTPPVLDSDGSFFLTSKLTVDKSRWQQGNVFSCSVMHEALHNHYTQKSLSLSPGK
SEQ ID NO: 121:
X₁X₂SX₃X₄X₅LQX₆ESVFQSGAHAYRIPALLYLPGQQSLLAFAEQRASX₇X₈DEHAELIVX₉RR
GDYDAX₁₀THQVQWX₁₁AQEVVAQAX₁₂LX₁₃GHRSMNPCPLYDX₁₄QTGTLFLFFIAIPX₁₅X₁₆V
TEX₁₇QQLQTRANVTRLX₁₈X₁₉VTSTDHGRTWSSPRDLTDAAIGPX₂₀YREWSTFAVGPGHX₂₁L
QLHDX₂₂X₂₃RSLVVPAYAYRKLHPX₂₄X₂₅X₂₆PIPSAFX₂₇FLSHDHGRTWARGHFVX₂₈QDTX₂₉
ECQVAEVX₃₀TGEQRVVTLNARSX₃₁X₃₂X₃₃X₃₄RX₃₅QAQSX₃₆NX₃₇GLDFQX₃₈X₃₉QX₄₀VKKL
X₄₁EPPPX₄₂GX₄₃QGSVISFPSPRSGPGSPAQX₄₄LLYTHPTHX₄₅X₄₆QRADLGAYLNPRPPAP
EAWSEPX₄₇LLAKGSX₄₈AYSDLQSMGTGPDGSPLFGX₄₉LYEANDYEEIX₅₀FX₅₁MFTLKQAFP
AEYLPQX₅₂DKTHTCPPCPAPELLGGPSVFLFPPKPKDTLMISRTPEVTCVVVDVSHEDPEVK
FNWYVDGVEVHNAKTKPREEQYNSTYRVVSVLTVLHQDWLNGKEYKCKVSNKALPAPIEKTI
SKAKGQPREPQVYTLPPSREEMTKNQVSLTCLVKGFYPSDIAVEWESNGQPENNYKTTPPVL
DSDGSFFLTSKLTVDKSRWQQGNVFSCSVMHEALHNHYTQKSLSLSPGK
SEQ ID NO: 122:
DASLPYLQKESVFQSGAHAYRIPALLYLPGQQSLLAFAEQRASKKDEHAELIVLRRGDYDAG
THQVQWQAQEVVAQARLDGHRSMNPCPLYDEQTGTLFLFFIAIPGQVTEQQQLQTRANVTRL
CQVTSTDHGRTWSSPRDLTDAAIGPAYREWSTFAVGPGHCLQLHDRARSLVVPAYAYRKLHP
KQRPIPSAFCFLSHDHGRTWARGHFVAQDTLECQVAEVETGEQRVVTLNARSHLRARVQAQS
TNDGLDFQESQLVKKLVEPPPQGCQGSVISFPSPRSGPGSPAQWLLYTHPTHARQRADLGAY
LNPRPPAPEAWSEPVLLAKGSAAYSDLQSMGTGPDGSPLFGCLYEANDYEEIVFLMFTLKQA
FPAEYLPQGGGGSGGGGSDKTHTCPPCPAPELLGGPSVFLFPPKPKDTLMISRTPEVTCVVV
DVSHEDPEVKFNWYVDGVEVHNAKTKPREEQYNSTYRVVSVLTVLHQDWLNGKEYKCKVSNK
ALPAPIEKTISKAKGQPREPQVYTLPPSREEMTKNQVSLTCLVKGFYPSDIAVEWESNGQPE
NNYKTTPPVLDSDGSFFLYSKLTVDKSRWQQGNVFSCSVMHEALHNHYTQKSLSLSPGKGGG
GSGGGGSGGGGSEVQLVESGGGLVQPGGSLRLSCAASGFNIKDTYIHWVRQAPGKGLEWVAR
IYPTNGYTRYADSVKGRFTISADTSKNTAYLQMNSLRAEDTAVYYCSRWGGDGFYAMDYWGQ
GTLVTVSSGGGGSGGGGSGGGGSDIQMTQSPSSLSASVGDRVTITCRASQDVNTAVAWYQQK
PGKAPKLLIYSASFLYSGVPSRFSGSRSGTDFTLTISSLQPEDFATYYCQQHYTTPPTFGQG
TKVEIK
SEQ ID NO: 123:
DASLPYLQKESVFQSGAHAYRIPALLYLPGQQSLLAFAEQRASKKDEHAELIVLRRGDYDAG
THQVQWQAQEVVAQARLDGHRSMNPCPLYDEQTGTLFLFFIAIPGQVTEQQQLQTRANVTRL
CYVTSTDHGRTWSSPRDLTDAAIGPAYREWSTFAVGPGHCLQLHDRARSLVVPAYAYRKLHP
KQRPIPSAFCFLSHDHGRTWARGHFVAQDTLECQVAEVETGEQRVVTLNARSHLRARVQAQS
TNDGLDFQESQLVKKLVEPPPTGCQGSVISFPSPRSGPGSPAQWLLYTHPTHSWQRADLGAY
LNPRPPAPEAWSEPVLLAKGSAAYSDLQSMGTGPDGSPLFGCLYEANDYEEIVFLMFTLKQA
FPAEYLPQGGGGSGGGGSDKTHTCPPCPAPELLGGPSVFLFPPKPKDTLMISRTPEVTCVVV
DVSHEDPEVKFNWYVDGVEVHNAKTKPREEQYNSTYRVVSVLTVLHQDWLNGKEYKCKVSNK
ALPAPIEKTISKAKGQPREPQVYTLPPSREEMTKNQVSLTCLVKGFYPSDIAVEWESNGQPE
NNYKTTPPVLDSDGSFFLYSKLTVDKSRWQQGNVFSCSVMHEALHNHYTQKSLSLSPGKGGG
GSGGGGSGGGGSEVQLVESGGGLVQPGGSLRLSCAASGFNIKDTYIHWVRQAPGKGLEWVAR
IYPTNGYTRYADSVKGRFTISADTSKNTAYLQMNSLRAEDTAVYYCSRWGGDGFYAMDYWGQ
GTLVTVSSGGGGSGGGGSGGGGSDIQMTQSPSSLSASVGDRVTITCRASQDVNTAVAWYQQK
PGKAPKLLIYSASFLYSGVPSRFSGSRSGTDFTLTISSLQPEDFATYYCQQHYTTPPTFGQG
TKVEIK
SEQ ID NO: 124:
DASLPYLQKESVFQSGAHAYRIPALLYLPGQQSLLAFAEQRASKKDEHAELIVLRRGDYDAG
THQVQWQAQEVVAQARLDGHRSMNPCPLYDEQTGTLFLFFIAIPGQVTEQQQLQTRANVTRL
CYVTSTDHGRTWSSPRDLTDAAIGPAYREWSTFAVGPGHCLQLHDRARSLVVPAYAYRKLHP
KQRPIPSAFCFLSHDHGRTWARGHFVAQDTLECQVAEVETGEQRVVTLNARSHLRFRVQAQS
TNDGLDFQESQLVKKLVEPPPTGCQGSVISFPSPRSGPGSPAQWLLYTHPTHSWQRADLGAY
LNPRPPAPEAWSEPVLLAKGSAAYSDLQSMGTGPDGSPLFGCLYEANDYEEIVFLMFTLKQA
FPAEYLPQGGGGSGGGGSDKTHTCPPCPAPELLGGPSVFLFPPKPKDTLMISRTPEVTCVVV
DVSHEDPEVKFNWYVDGVEVHNAKTKPREEQYNSTYRVVSVLTVLHQDWLNGKEYKCKVSNK
ALPAPIEKTISKAKGQPREPQVYTLPPSREEMTKNQVSLTCLVKGFYPSDIAVEWESNGQPE
NNYKTTPPVLDSDGSFFLYSKLTVDKSRWQQGNVFSCSVMHEALHNHYTQKSLSLSPGKGGG
GSGGGGSGGGGSEVQLVESGGGLVQPGGSLRLSCAASGFNIKDTYIHWVRQAPGKGLEWVAR
IYPTNGYTRYADSVKGRFTISADTSKNTAYLQMNSLRAEDTAVYYCSRWGGDGFYAMDYWGQ
GTLVTVSSGGGGSGGGGSGGGGSDIQMTQSPSSLSASVGDRVTITCRASQDVNTAVAWYQQK
PGKAPKLLIYSASFLYSGVPSRFSGSRSGTDFTLTISSLQPEDFATYYCQQHYTTPPTFGQG
TKVEIK
SEQ ID NO: 125:
DASLPYLQKESVFQSGAHAYRIPALLYLPGQQSLLAFAEQRASKKDEHAELIVLRRGDYDAG
THQVQWQAQEVVAQARLDGHRSMNPCPLYDEQTGTLFLFFIAIPGQVTEQQQLQTRANVTRL
CQVTSTDHGRTWSSPRDLTDAAIGPAYREWSTFAVGPGHCLQLHDRARSLVVPAYAYRKLHP
KQRPIPSAFCFLSHDHGRTWARGHFVAQDTLECQVAEVETGEQRVVTLNARSHLRARVQAQS
TNDGLDFQESQLVKKLVEPPPQGCQGSVISFPSPRSGPGSPAQWLLYTHPTHSWQRADLGAY
LNPRPPAPEAWSEPVLLAKGSAAYSDLQSMGTGPDGSPLFGCLYEANDYEEIVFLMFTLKQA
FPAEYLPQEPKSSDKTHTCPPCPAPELLGGPSVFLFPPKPKDTLMISRTPEVTCVVVDVSHE
DPEVKFNWYVDGVEVHNAKTKPREEQYNSTYRVVSVLTVLHQDWLNGKEYKCKVSNKALPAP
IEKTISKAKGQPREPQVYTLPPSREEMTKNQVSLTCLVKGFYPSDIAVEWESNGQPENNYKT
TPPVLDSDGSFFLYSKLTVDKSRWQQGNVFSCSVMHEALHNHYTQKSLSLSPGKGGGGSGGG
GSGGGGSEVQLVESGGGLVQPGGSLRLSCAASGFNIKDTYIHWVRQAPGKGLEWVARIYPTN
GYTRYADSVKGRFTISADTSKNTAYLQMNSLRAEDTAVYYCSRWGGDGFYAMDYWGQGTLVT
VSSGGGGSGGGGSGGGGSDIQMTQSPSSLSASVGDRVTITCRASQDVNTAVAWYQQKPGKAP
KLLIYSASFLYSGVPSRFSGSRSGTDFTLTISSLQPEDFATYYCQQHYTTPPTFGQGTKVEI
K
SEQ ID NO: 126:
DASLPYLQDESVFQSGAHAYRIPALLYLPGQQSLLAFAEQRASKKDEHAELIVLRRGDYDAP
THQVQWQAQEVVAQARLDGHRSMNPCPLYDEQTGTLFLFFIAIPGQVTEQQQLQTRANVTRL
CQVTSTDHGRTWSSPRDLTDAAIGPAYREWSTFAVGPGHCLQLHDRARSLVVPAYAYRKLHP
KQRPIPSAFCFLSHDHGRTWARGHFVAQDTLECQVAEVETGEQRVVTLNARSHLRARVQAQS
TNDGLDFQESQLVKKLVEPPPQGCQGSVISFPSPRSGPGSPAQWLLYTHPTHSWQRADLGAY
LNPRPPAPEAWSEPVLLAKGSAAYSDLQSMGTGPDGSPLFGCLYEANDYEEIRFIMFTLKQA
FPAEYLPQEPKSSDKTHTCPPCPAPELLGGPSVFLFPPKPKDTLMISRTPEVTCVVVDVSHE
DPEVKFNWYVDGVEVHNAKTKPREEQYNSTYRVVSVLTVLHQDWLNGKEYKCKVSNKALPAP
IEKTISKAKGQPREPQVYTLPPSREEMTKNQVSLTCLVKGFYPSDIAVEWESNGQPENNYKT
TPPVLDSDGSFFLYSKLTVDKSRWQQGNVFSCSVMHEALHNHYTQKSLSLSPGKGGGGSGGG
GSGGGGSEVQLVESGGGLVQPGGSLRLSCAASGFNIKDTYIHWVRQAPGKGLEWVARIYPTN
GYTRYADSVKGRFTISADTSKNTAYLQMNSLRAEDTAVYYCSRWGGDGFYAMDYWGQGTLVT
VSSGGGGSGGGGSGGGGSDIQMTQSPSSLSASVGDRVTITCRASQDVNTAVAWYQQKPGKAP
KLLIYSASFLYSGVPSRFSGSRSGTDFTLTISSLQPEDFATYYCQQHYTTPPTFGQGTKVEI
K
SEQ ID NO: 127:
DASLPYLQKESVFQSGAHAYRIPALLYLPGQQSLLAFAEQRASKKDEHAELIVLRRGDYDAN
THQVQWQAQEVVAQARLDGHRSMNPCPLYDAQTGTLFLFFIAIPGQVTEQQQLQTRANVTRL
CQVTSTDHGRTWSSPRDLTDAAIGPAYREWSTFAVGPGHCLQLHDRARSLVVPAYAYRKLHP
KQRPIPSAFCFLSHDHGRTWARGHFVAQDTLECQVAEVETGEQRVVTLNARSHLRARVQAQS
TNDGLDFQESQLVKKLVEPPPQGCQGSVISFPSPRSGPGSPAQWLLYTHPTHSWQRADLGAY
LNPRPPAPEAWSEPVLLAKGSAAYSDLQSMGTGPDGSPLFGCLYEANDYEEIVFLMFTLKQA
FPAEYLPQEPKSSDKTHTCPPCPAPELLGGPSVFLFPPKPKDTLMISRTPEVTCVVVDVSHE
DPEVKFNWYVDGVEVHNAKTKPREEQYNSTYRVVSVLTVLHQDWLNGKEYKCKVSNKALPAP
IEKTISKAKGQPREPQVYTLPPSREEMTKNQVSLTCLVKGFYPSDIAVEWESNGQPENNYKT
TPPVLDSDGSFFLYSKLTVDKSRWQQGNVFSCSVMHEALHNHYTQKSLSLSPGKGGGGSGGG
GSGGGGSEVQLVESGGGLVQPGGSLRLSCAASGFNIKDTYIHWVRQAPGKGLEWVARIYPTN
GYTRYADSVKGRFTISADTSKNTAYLQMNSLRAEDTAVYYCSRWGGDGFYAMDYWGQGTLVT
VSSGGGGSGGGGSGGGGSDIQMTQSPSSLSASVGDRVTITCRASQDVNTAVAWYQQKPGKAP
KLLIYSASFLYSGVPSRFSGSRSGTDFTLTISSLQPEDFATYYCQQHYTTPPTFGQGTKVEI
K
SEQ ID NO: 128:
DASLPYLQKESVFQSGAHAYRIPALLYLPGQQSLLAFAEQRASKKDEHAELIVLRRGDYDAP
THQVQWQAQEVVAQARLDGHRSMNPCPLYDAQTGTLFLFFIAIPGQVTEQQQLQTRANVTRL
CQVTSTDHGRTWSSPRDLTDAAIGPAYREWSTFAVGPGHCLQLHDRARSLVVPAYAYRKLHP
KQRPIPSAFCFLSHDHGRTWARGHFVAQDTLECQVAEVETGEQRVVTLNARSHLRARVQAQS
TNDGLDFQESQLVKKLVEPPPAGCQGSVISFPSPRSGPGSPAQWLLYTHPTHRKQRADLGAY
LNPRPPAPEAWSEPVLLAKGSAAYSDLQSMGTGPDGSPLFGCLYEANDYEEIVFLMFTLKQA
FPAEYLPQEPKSSDKTHTCPPCPAPELLGGPSVFLFPPKPKDTLMISRTPEVTCVVVDVSHE
DPEVKFNWYVDGVEVHNAKTKPREEQYNSTYRVVSVLTVLHQDWLNGKEYKCKVSNKALPAP
IEKTISKAKGQPREPQVYTLPPSREEMTKNQVSLTCLVKGFYPSDIAVEWESNGQPENNYKT
TPPVLDSDGSFELYSKLTVDKSRWQQGNVFSCSVMHEALHNHYTQKSLSLSPGKGGGGSGGG
GSGGGGSEVQLVESGGGLVQPGGSLRLSCAASGFNIKDTYIHWVRQAPGKGLEWVARIYPTN
GYTRYADSVKGRFTISADTSKNTAYLQMNSLRAEDTAVYYCSRWGGDGFYAMDYWGQGTLVT
VSSGGGGSGGGGSGGGGSDIQMTQSPSSLSASVGDRVTITCRASQDVNTAVAWYQQKPGKAP
KLLIYSASFLYSGVPSRFSGSRSGTDFTLTISSLQPEDFATYYCQQHYTTPPTFGQGTKVEI
K
SEQ ID NO: 129:
DASLPYLQKESVFQSGAHAYRIPALLYLPGQQSLLAFAEQRASKKDEHAELIVLRRGDYDAS
THQVQWQAQEVVAQARLDGHRSMNPCPLYDAQTGTLFLFFIAIPGQVTEQQQLQTRANVTRL
CQVTSTDHGRTWSSPRDLTDAAIGPAYREWSTFAVGPGHCLQLHDRARSLVVPAYAYRKLHP
KQRPIPSAFCFLSHDHGRTWARGHFVAQDTLECQVAEVETGEQRVVTLNARSHLRARVQAQS
TNDGLDFQESQLVKKLVEPPPAGCQGSVISFPSPRSGPGSPAQWLLYTHPTHRKQRADLGAY
LNPRPPAPEAWSEPVLLAKGSAAYSDLQSMGTGPDGSPLFGCLYEANDYEEIVFLMFTLKQA
FPAEYLPQEPKSSDKTHTCPPCPAPELLGGPSVFLFPPKPKDTLMISRTPEVTCVVVDVSHE
DPEVKFNWYVDGVEVHNAKTKPREEQYNSTYRVVSVLTVLHQDWLNGKEYKCKVSNKALPAP
IEKTISKAKGQPREPQVYTLPPSREEMTKNQVSLTCLVKGFYPSDIAVEWESNGQPENNYKT
TPPVLDSDGSFFLYSKLTVDKSRWQQGNVFSCSVMHEALHNHYTQKSLSLSPGKGGGGSGGG
GSGGGGSEVQLVESGGGLVQPGGSLRLSCAASGFNIKDTYIHWVRQAPGKGLEWVARIYPTN
GYTRYADSVKGRFTISADTSKNTAYLQMNSLRAEDTAVYYCSRWGGDGFYAMDYWGQGTLVT
VSSGGGGSGGGGSGGGGSDIQMTQSPSSLSASVGDRVTITCRASQDVNTAVAWYQQKPGKAP
KLLIYSASFLYSGVPSRFSGSRSGTDFTLTISSLQPEDFATYYCQQHYTTPPTFGQGTKVEI
K
SEQ ID NO: 130:
DASLPYLQKESVFQSGAHAYRIPALLYLPGQQSLLAFAEQRASKKDEHAELIVLRRGDYDAT
THQVQWQAQEVVAQARLDGHRSMNPCPLYDAQTGTLFLFFIAIPGQVTEQQQLQTRANVTRL
CQVTSTDHGRTWSSPRDLTDAAIGPAYREWSTFAVGPGHCLQLHDRARSLVVPAYAYRKLHP
KQRPIPSAFCFLSHDHGRTWARGHFVAQDTLECQVAEVETGEQRVVTLNARSHLRARVQAQS
TNDGLDFQESQLVKKLVEPPPAGCQGSVISFPSPRSGPGSPAQWLLYTHPTHRKQRADLGAY
LNPRPPAPEAWSEPVLLAKGSAAYSDLQSMGTGPDGSPLFGCLYEANDYEEIVFLMFTLKQA
FPAEYLPQEPKSSDKTHTCPPCPAPELLGGPSVFLFPPKPKDTLMISRTPEVTCVVVDVSHE
DPEVKFNWYVDGVEVHNAKTKPREEQYNSTYRVVSVLTVLHQDWLNGKEYKCKVSNKALPAP
IEKTISKAKGQPREPQVYTLPPSREEMTKNQVSLTCLVKGFYPSDIAVEWESNGQPENNYKT
TPPVLDSDGSFFLYSKLTVDKSRWQQGNVFSCSVMHEALHNHYTQKSLSLSPGKGGGGSGGG
GSGGGGSEVQLVESGGGLVQPGGSLRLSCAASGFNIKDTYIHWVRQAPGKGLEWVARIYPTN
GYTRYADSVKGRFTISADTSKNTAYLQMNSLRAEDTAVYYCSRWGGDGFYAMDYWGQGTLVT
VSSGGGGSGGGGSGGGGSDIQMTQSPSSLSASVGDRVTITCRASQDVNTAVAWYQQKPGKAP
KLLIYSASFLYSGVPSRFSGSRSGTDFTLTISSLQPEDFATYYCQQHYTTPPTFGQGTKVEI
K
SEQ ID NO: 131:
DASLPYLQKESVFQSGAHAYRIPALLYLPGQQSLLAFAEQRASKKDEHAELIVLRRGDYDAN
THQVQWQAQEVVAQARLDGHRSMNPCPLYDAQTGTLFLFFIAIPGQVTEQQQLQTRANVTRL
CQVTSTDHGRTWSSPRDLTDAAIGPAYREWSTFAVGPGHCLQLHDRARSLVVPAYAYRKLHP
KQRPIPSAFCFLSHDHGRTWARGHFVAQDTLECQVAEVETGEQRVVTLNARSHLRARVQAQS
TNDGLDFQESQLVKKLVEPPPAGCQGSVISFPSPRSGPGSPAQWLLYTHPTHRKQRADLGAY
LNPRPPAPEAWSEPVLLAKGSAAYSDLQSMGTGPDGSPLFGCLYEANDYEEIVFLMETLKQA
FPAEYLPQEPKSSDKTHTCPPCPAPELLGGPSVFLFPPKPKDTLMISRTPEVTCVVVDVSHE
DPEVKFNWYVDGVEVHNAKTKPREEQYNSTYRVVSVLTVLHQDWLNGKEYKCKVSNKALPAP
IEKTISKAKGQPREPQVYTLPPSREEMTKNQVSLTCLVKGFYPSDIAVEWESNGQPENNYKT
TPPVLDSDGSFFLYSKLTVDKSRWQQGNVFSCSVMHEALHNHYTQKSLSLSPGKGGGGSGGG
GSGGGGSEVQLVESGGGLVQPGGSLRLSCAASGFNIKDTYIHWVRQAPGKGLEWVARIYPTN
GYTRYADSVKGRFTISADTSKNTAYLQMNSLRAEDTAVYYCSRWGGDGFYAMDYWGQGTLVT
VSSGGGGSGGGGSGGGGSDIQMTQSPSSLSASVGDRVTITCRASQDVNTAVAWYQQKPGKAP
KLLIYSASFLYSGVPSRFSGSRSGTDFTLTISSLQPEDFATYYCQQHYTTPPTFGQGTKVEI
K
SEQ ID NO: 132:
DASLPYLQKESVFQSGAHAYRIPALLYLPGQQSLLAFAEQRASKKDEHAELIVLRRGDYDAG
THQVQWQAQEVVAQARLDGHRSMNPCPLYDEQTGTLFLFFIAIPGQVTEQQQLQTRANVTRL
CQVTSTDHGRTWSSPRDLTDAAIGPAYREWSTFAVGPGHCLQLHDRARSLVVPAYAYRKLHP
KQRPIPSAFCFLSHDHGRTWARGHFVAQDTLECQVAEVETGEQRVVTLNARSHLRARVQAQS
TNDGLDFQESQLVKKLVEPPPQGCQGSVISFPSPRSGPGSPAQWLLYTHPTHARQRADLGAY
LNPRPPAPEAWSEPVLLAKGSAAYSDLQSMGTGPDGSPLFGCLYEANDYEEIVFLMFTLKQA
FPAEYLPQEPKSSDKTHTCPPCPAPELLGGPSVFLFPPKPKDTLMISRTPEVTCVVVDVSHE
DPEVKFNWYVDGVEVHNAKTKPREEQYNSTYRVVSVLTVLHQDWLNGKEYKCKVSNKALPAP
IEKTISKAKGQPREPQVYTLPPSREEMTKNQVSLTCLVKGFYPSDIAVEWESNGQPENNYKT
TPPVLDSDGSFFLYSKLTVDKSRWQQGNVFSCSVMHEALHNHYTQKSLSLSPGKGGGGSGGG
GSGGGGSEVQLVESGGGLVQPGGSLRLSCAASGFNIKDTYIHWVRQAPGKGLEWVARIYPTN
GYTRYADSVKGRFTISADTSKNTAYLQMNSLRAEDTAVYYCSRWGGDGFYAMDYWGQGTLVT
VSSGGGGSGGGGSGGGGSDIQMTQSPSSLSASVGDRVTITCRASQDVNTAVAWYQQKPGKAP
KLLIYSASFLYSGVPSRFSGSRSGTDFTLTISSLQPEDFATYYCQQHYTTPPTFGQGTKVEI
K
SEQ ID NO: 133:
DASLPYLQKESVFQSGAHAYRIPALLYLPGQQSLLAFAEQRASKKDEHAELIVLRRGDYDAG
THQVQWQAQEVVAQARLDGHRSMNPCPLYDEQTGTLFLFFIAIPGQVTEQQQLQTRANVTRL
CYVTSTDHGRTWSSPRDLTDAAIGPAYREWSTFAVGPGHCLQLHDRARSLVVPAYAYRKLHP
KQRPIPSAFCFLSHDHGRTWARGHFVAQDTLECQVAEVETGEQRVVTLNARSHLRARVQAQS
TNDGLDFQESQLVKKLVEPPPTGCQGSVISFPSPRSGPGSPAQWLLYTHPTHSWQRADLGAY
LNPRPPAPEAWSEPVLLAKGSAAYSDLQSMGTGPDGSPLFGCLYEANDYEEIVFLMFTLKQA
FPAEYLPQEPKSSDKTHTCPPCPAPELLGGPSVFLFPPKPKDTLMISRTPEVTCVVVDVSHE
DPEVKFNWYVDGVEVHNAKTKPREEQYNSTYRVVSVLTVLHQDWLNGKEYKCKVSNKALPAP
IEKTISKAKGQPREPQVYTLPPSREEMTKNQVSLTCLVKGFYPSDIAVEWESNGQPENNYKT
TPPVLDSDGSFFLYSKLTVDKSRWQQGNVFSCSVMHEALHNHYTQKSLSLSPGKGGGGSGGG
GSGGGGSEVQLVESGGGLVQPGGSLRLSCAASGFNIKDTYIHWVRQAPGKGLEWVARIYPTN
GYTRYADSVKGRFTISADTSKNTAYLQMNSLRAEDTAVYYCSRWGGDGFYAMDYWGQGTLVT
VSSGGGGSGGGGSGGGGSDIQMTQSPSSLSASVGDRVTITCRASQDVNTAVAWYQQKPGKAP
KLLIYSASFLYSGVPSRFSGSRSGTDFTLTISSLQPEDFATYYCQQHYTTPPTFGQGTKVEI
K
SEQ ID NO: 134:
DASLPYLQKESVFQSGAHAYRIPALLYLPGQQSLLAFAEQRASKKDEHAELIVLRRGDYDAG
THQVQWQAQEVVAQARLDGHRSMNPCPLYDEQTGTLFLFFIAIPGQVTEQQQLQTRANVTRL
CYVTSTDHGRTWSSPRDLTDAAIGPAYREWSTFAVGPGHCLQLHDRARSLVVPAYAYRKLHP
KQRPIPSAFCFLSHDHGRTWARGHFVAQDTLECQVAEVETGEQRVVTLNARSHLRFRVQAQS
TNDGLDFQESQLVKKLVEPPPTGCQGSVISFPSPRSGPGSPAQWLLYTHPTHSWQRADLGAY
LNPRPPAPEAWSEPVLLAKGSAAYSDLQSMGTGPDGSPLFGCLYEANDYEEIVFLMFTLKQA
FPAEYLPQEPKSSDKTHTCPPCPAPELLGGPSVFLFPPKPKDTLMISRTPEVTCVVVDVSHE
DPEVKFNWYVDGVEVHNAKTKPREEQYNSTYRWSVLTVLHQDWLNGKEYKCKVSNKALPAP
IEKTISKAKGQPREPQVYTLPPSREEMTKNQVSLTCLVKGFYPSDIAVEWESNGQPENNYKT
TPPVLDSDGSFFLYSKLTVDKSRWQQGNVFSCSVMHEALHNHYTQKSLSLSPGKGGGGSGGG
GSGGGGSEVQLVESGGGLVQPGGSLRLSCAASGFNIKDTYIHWVRQAPGKGLEWVARIYPTN
GYTRYADSVKGRFTISADTSKNTAYLQMNSLRAEDTAVYYCSRWGGDGFYAMDYWGQGTLVT
VSSGGGGSGGGGSGGGGSDIQMTQSPSSLSASVGDRVTITCRASQDVNTAVAWYQQKPGKAP
KLLIYSASFLYSGVPSRFSGSRSGTDFTLTISSLQPEDFATYYCQQHYTTPPTFGQGTKVEI
K
SEQ ID NO: 135:
X₁ASLPX₂LQX₃ESVFQSGAHAYRIPALLYLPGQQSLLAFAEQRASKKDEHAELIVLRRGDYD
AX₄THQVQWQAQEVVAQARLDGHRSMNPCPLYDX₅QTGTLFLFFIAIPGQVTEQQQLQTRANV
TRLCX₆VTSTDHGRTWSSPRDLTDAAIGPAYREWSTFAVGPGHCLQLHDRARSLWPAYAYRK
LHPX₇QRPIPSAFCFLSHDHGRTWARGHFVAQDTLECQVAEVETGEQRVVTLNARSHLRX₈RV
QAQSTNDGLDFQESQLVKKLVEPPPX₉GCQGSVISFPSPRSGPGSPAQWLLYTHPTHX₁₀X₁₁Q
RADLGAYLNPRPPAPEAWSEPVLLAKGSX₁₂AYSDLQSMGTGPDGSPLFGCLYEANDYEEIX₁₃
FX₁₄MFTLKQAFPAEYLPQX₁₅DKTHTCPPCPAPELLGGPSVFLFPPKPKDTLMISRTPEVTCV
VVDVSHEDPEVKFNWYVDGVEVHNAKTKPREEQYNSTYRVVSVLTVLHQDWLNGKEYKCKVS
NKALPAPIEKTISKAKGQPREPQVYTLPPSREEMTKNQVSLTCLVKGFYPSDIAVEWESNGQ
PENNYKTTPPVLDSDGSFFLYSKLTVDKSRWQQGNVFSCSVMHEALHNHYTQKSLSLSPGKG
GGGSGGGGSGGGGSEVQLVESGGGLVQPGGSLRLSCAASGFNIKDTYIHWVRQAPGKGLEWV
ARIYPTNGYTRYADSVKGRFTISADTSKNTAYLQMNSLRAEDTAVYYCSRWGGDGFYAMDYW
GQGTLVTVSSGGGGSGGGGSGGGGSDIQMTQSPSSLSASVGDRVTITCRASQDVNTAVAWYQ
QKPGKAPKLLIYSASFLYSGVPSRFSGSRSGTDFTLTISSLQPEDFATYYCQQHYTTPPTFG
QGTKVEIK
SEQ ID NO: 136:
X₁X₂SX₃X₄X₅LQX₆ESVFQSGAHAYRIPALLYLPGQQSLLAFAEQRASX₇X₈DEHAELIVX₉RR
GDYDAX₁₀THQVQWX₁₁AQEVVAQAX₁₂LX₁₃GHRSMNPCPLYDX₁₄QTGTLFLFFIAIPX₁₅X₁₆V
TEX₁₇QQLQTRANVTRLX₁₈X₁₉VTSTDHGRTWSSPRDLTDAAIGPX₂₀YREWSTFAVGPGHX₂₁L
QLHDX₂₂X₂₃RSLVVPAYAYRKLHPX₂₄X₂₅X₂₆PIPSAFX₂₇FLSHDHGRTWARGHFVX₂₈QDTX₂₉
ECQVAEVX₃₀TGEQRVVTLNARSX₃₁X₃₂X₃₃X₃₄RX₃₅QAQSX₃₆NX₃₇GLDFQX₃₈X₃₉QX₄₀VKKL
X₄₁EPPPX₄₂GX₄₃QGSVISFPSPRSGPGSPAQX₄₄LLYTHPTHX₄₅X₄₆QRADLGAYLNPRPPAP
EAWSEPX₄₇LLAKGSX₄₈AYSDLQSMGTGPDGSPLFGX₄₉LYEANDYEEIX₅₀FX₅₁MFTLKQAFP
AEYLPQX₅₂DKTHTCPPCPAPELLGGPSVFLFPPKPKDTLMISRTPEVTCVVVDVSHEDPEVK
FNWYVDGVEVHNAKTKPREEQYNSTYRVVSVLTVLHQDWLNGKEYKCKVSNKALPAPIEKTI
SKAKGQPREPQVYTLPPSREEMTKNQVSLTCLVKGFYPSDIAVEWESNGQPENNYKTTPPVL
DSDGSFFLYSKLTVDKSRWQQGNVFSCSVMHEALHNHYTQKSLSLSPGKGGGGSGGGGSGGG
GSEVQLVESGGGLVQPGGSLRLSCAASGFNIKDTYIHWVRQAPGKGLEWVARIYPTNGYTRY
ADSVKGRFTISADTSKNTAYLQMNSLRAEDTAVYYCSRWGGDGFYAMDYWGQGTLVTVSSGG
GGSGGGGSGGGGSDIQMTQSPSSLSASVGDRVTITCRASQDVNTAVAWYQQKPGKAPKLLIY
SASFLYSGVPSRFSGSRSGTDFTLTISSLQPEDFATYYCQQHYTTPPTFGQGTKVEIK
SEQ ID NO: 137:
gatGCATCTCTGCCTTACCTGCAGAAAGAAAGCGTGTTCCAGTCTGGCGCCCACGCCTACAG
AATTCCCGCTCTGCTGTATCTGCCAGGCCAGCAGTCTCTGCTGGCTTTCGCTGAACAGCGGG
CCAGCAAGAAGGATGAGCACGCCGAACTGATCGTGCTGCGGAGAGGCGATTACGACGCCggc
ACACATCAGGTGCAGTGGCAGGCTCAAGAGGTGGTGGCTCAGGCTAGACTGGACGGCCACAG
ATCTATGAACCCCTGTCCTCTGTACGATgaaCAGACCGGCACACTGTTTCTGTTCTTTATCG
CTATCCCCGGCCAAGTGACCGAGCAGCAGCAGCTGCAGACAAGAGCCAACGTGACCAGACTG
TGTtacGTGACCTCCACCGACCACGGCAGAACCTGGTCTAGCCCTAGAGATCTGACCGACGC
CGCCATCGGACCTGCCTATAGAGAGTGGTCCACCTTCGCCGTTGGACCTGGACACTGTCTCC
AGCTGCACGACAGGGCTAGATCTCTGGTGGTGCCTGCCTACGCCTATAGAAAGCTGCACCCC
AAACAGCGGCCTATTCCTAGCGCCTTCTGCTTTCTGAGCCACGATCACGGCAGGACATGGGC
CAGAGGACATTTCGTGGCCCAGGACACACTGGAATGCCAGGTGGCCGAAGTGGAAACCGGCG
AGCAGAGAGTCGTGACCCTGAACGCCAGATCTCACCTGAGATTCAGAGTGCAGGCCCAGAGC
ACAAACGACGGCCTGGATTTCCAAGAGAGCCAGCTGGTCAAGAAACTGGTGGAACCTCCTCC
AaccGGCTGTCAGGGAAGCGTGATCAGCTTTCCATCTCCTAGAAGCGGCCCTGGCTCTCCTG
CTCAGTGGCTGCTGTATACACACCCCACACACAGCTGGCAGAGAGCCGATCTGGGCGCCTAC
CTGAATCCTAGACCTCCTGCTCCTGAGGCTTGGAGCGAACCTGTTCTGCTGGCCAAGGGCAG
CgctGCCTACAGCGATCTGCAGTCTATGGGCACAGGCCCTGATGGCAGCCCTCTGTTTGGCT
GTCTGTACGAGGCCAACGACTACGAAGAGATCGTGTTCCTGATGTTCACCCTGAAGCAGGCC
TTTCCAGCCGAGTACCTGCCTCAA
SEQ ID NO: 138:
X₁X₂SX₃X₄X₅LQX₆ESVFQSGAHAYRIPALLYLPGQQSLLAFAEQRASX₇X₈DEHAELIVX₉RR
GDYDAX₁₀THQVQWX₁₁AQEVVAQAX₁₂LX₁₃GHRSMNPCPLYDX₁₄QTGTLFLFFIAIPX₁₅X₁₆V
TEX₁₇QQLQTRANVTRLX₁₈X₁₉VTSTDHGRTWSSPRDLTDAAIGPX₂₀YREWSTFAVGPGHX₂₁L
QLHDX₂₂X₂₃RSLVVPAYAYRKLHPX₂₄X₂₅X₂₆PIPSAFX₂₇FLSHDHGRTWARGHFVX₂₈QDTX₂₉
ECQVAEVX₃₀TGEQRVVTLNARSX₃₁X₃₂X₃₃X₃₄RX₃₅QAQSX₃₆NX₃₇GLDFQX₃₈X₃₉QX₄₀VKKL
X₄₁EPPPX₄₂GX₄₃QGSVISFPSPRSGPGSPAQX₄₄LLYTHPTHX₄₅X₄₆QRADLGAYLNPRPPAP
EAWSEPX₄₇LLAKGSX₄₈AYSDLQSMGTGPDGSPLFGX₄₉LYEANDYEEIX₅₀FX₅₁MFTLKQAFP
AEYLPQ
SEQ ID NO: 139:
X₁ASLPX₂LQX₃ESVFQSGAHAYRIPALLYLPGQQSLLAFAEQRASKKDEHAELIVLRRGDYD
AX₄THQVQWQAQEVVAQARLDGHRSMNPCPLYDX₅QTGTLFLFFIAIPGQVTEQQQLQTRANV
TRLCX₆VTSTDHGRTWSSPRDLTDAAIGPAYREWSTFAVGPGHCLQLHDRARSLVVPAYAYRK
LHPX₇QRPIPSAFCFLSHDHGRTWARGHFVAQDTLECQVAEVETGEQRVVTLNARSHLRX₈RV
QAQSTNDGLDFQESQLVKKLVEPPPX₉GCQGSVISFPSPRSGPGSPAQWLLYTHPTHX₁₀X₁₁Q
RADLGAYLNPRPPAPEAWSEPVLLAKGSX₁₂AYSDLQSMGTGPDGSPLFGCLYEANDYEEIX₁₃
FX₁₄MFTLKQAFPAEYLPQ
SEQ ID NO: 140:
GGGGS
SEQ ID NO: 141:
DASLPYLQKESVFQSGAHAYRIPALLYLPGQQSLLAFAEQRASKKDEHAELIVLRRGDYDAP
THQVQWQAQEVVAQARLDGHRSMNPCPLYDAQTGTLFLFFIAIPGQVTEQQQLQTRANVTRL
CQVTSTDHGRTWSSPRDLTDAAIGPAYREWSTFAVGPGHCLQLHDRARSLVVPAYAYRKLHP
KQRPIPSAFCFLSHDHGRTWARGHFVAQDTLECQVAEVETGEQRVVTLNARSHLRARVQAQS
TNDGLDFQESQLVKKLVEPPPQGCQGSVISFPSPRSGPGSPAQWLLYTHPTHSWQRADLGAY
LNPRPPAPEAWSEPVLLAKGSAAYSDLQSMGTGPDGSPLFGCLYEANDYEEIVFLMFTLKQA
FPAEYLPQGGGGSGGGGSDKTHTCPPCPAPELLGGPSVFLFPPKPKDTLMISRTPEVTCVVV
DVSHEDPEVKFNWYVDGVEVHNAKTKPREEQYNSTYRVVSVLTVLHQDWLNGKEYKCKVSNK
ALPAPIEKTISKAKGQPREPQVYTLPPSREEMTKNQVSLTCLVKGFYPSDIAVEWESNGQPE
NNYKTTPPVLDSDGSFFLTSKLTVDKSRWQQGNVFSCSVMHEALHNHYTQKSLSLSPGK
SEQ ID NO: 142:
gatGCATCTCTGCCTTACCTGCAGAAAGAAAGCGTGTTCCAGTCTGGCGCCCACGCCTACAG
AATTCCCGCTCTGCTGTATCTGCCAGGCCAGCAGTCTCTGCTGGCTTTCGCTGAACAGCGGG
CCAGCAAGAAGGATGAGCACGCCGAACTGATCGTGCTGCGGAGAGGCGATTACGACGCCCCT
ACACATCAGGTGCAGTGGCAGGCTCAAGAGGTGGTGGCTCAGGCTAGACTGGACGGCCACAG
ATCTATGAACCCCTGTCCTCTGTACGATGCCCAGACCGGCACACTGTTTCTGTTCTTTATCG
CTATCCCCGGCCAAGTGACCGAGCAGCAGCAGCTGCAGACAAGAGCCAACGTGACCAGACTG
TGTCAAGTGACCTCCACCGACCACGGCAGAACCTGGTCTAGCCCTAGAGATCTGACCGACGC
CGCCATCGGACCTGCCTATAGAGAGTGGTCCACCTTCGCCGTTGGACCTGGACACTGTCTCC
AGCTGCACGACAGGGCTAGATCTCTGGTGGTGCCTGCCTACGCCTATAGAAAGCTGCACCCC
AAACAGCGGCCTATTCCTAGCGCCTTCTGCTTTCTGAGCCACGATCACGGCAGGACATGGGC
CAGAGGACATTTCGTGGCCCAGGACACACTGGAATGCCAGGTGGCCGAAGTGGAAACCGGCG
AGCAGAGAGTCGTGACCCTGAACGCCAGATCTCACCTGAGAGCCAGAGTGCAGGCCCAGAGC
ACAAACGACGGCCTGGATTTCCAAGAGAGCCAGCTGGTCAAGAAACTGGTGGAACCTCCTCC
ACAGGGCTGTCAGGGAAGCGTGATCAGCTTTCCATCTCCTAGAAGCGGCCCTGGCTCTCCTG
CTCAGTGGCTGCTGTATACACACCCCACACACAGCTGGCAGAGAGCCGATCTGGGCGCCTAC
CTGAATCCTAGACCTCCTGCTCCTGAGGCTTGGAGCGAACCTGTTCTGCTGGCCAAGGGCAG
CgctGCCTACAGCGATCTGCAGTCTATGGGCACAGGCCCTGATGGCAGCCCTCTGTTTGGCT
GTCTGTACGAGGCCAACGACTACGAAGAGATCGTGTTCCTGATGTTCACCCTGAAGCAGGCC
TTTCCAGCCGAGTACCTGCCTCAAGGCGGAGGTGGAAGTGGCGGAGGCGGATCcGACAAAAC
TCACACATGCCCACCGTGCCCAGCACCTGAACTCCTGGGGGGACCGTCAGTCTTCCTCTTCC
CCCCAAAACCCAAGGACACCCTCATGATCTCCCGGACCCCTGAGGTCACATGCGTGGTGGTG
GACGTGAGCCACGAAGACCCTGAGGTCAAGTTCAACTGGTACGTGGACGGCGTGGAGGTGCA
TAATGCCAAGACAAAGCCGCGGGAGGAGCAGTACAACAGCACGTACCGTGTGGTCAGCGTCC
TCACCGTCCTGCACCAGGACTGGCTGAATGGCAAGGAGTACAAGTGCAAGGTCTCCAACAAA
GCCCTCCCAGCCCCCATCGAGAAAACCATCTCCAAAGCCAAAGGGCAGCCCCGAGAACCACA
GGTcTACACCCTGCCCCCATCCCGGGAGGAGATGACCAAGAACCAGGTCAGCCTGACCTGCC
TGGTCAAAGGCTTCTATCCCAGCGACATCGCCGTGGAGTGGGAGAGCAATGGGCAGCCGGAG
AACAACTACAAGACCACGCCTCCCGTGCTGGACTCCGACGGCTCCTTCTTCCTCacTAGCAA
GCTCACCGTGGACAAGAGCAGGTGGCAGCAGGGGAACGTCTTCTCATGCTCCGTGATGCATG
AGGCTCTGCACAACCACTACACGCAGAAGAGCCTCTCCCTGTCTCCGGGTAAA
SEQ ID NO: 143:
DASLPYLQKESVFQSGAHAYRIPALLYLPGQQSLLAFAEQRASKKDEHAELIVLRRGDYDAG
THQVQWQAQEVVAQARLDGHRSMNPCPLYDEQTGTLFLFFIAIPGQVTEQQQLQTRANVTRL
CYVTSTDHGRTWSSPRDLTDAAIGPAYREWSTFAVGPGHCLQLHDRARSLVVPAYAYRKLHP
KQRPIPSAFCFLSHDHGRTWARGHFVAQDTLECQVAEVETGEQRVVTLNARSHLRARVQAQS
TNDGLDFQESQLVKKLVEPPPTGCQGSVISFPSPRSGPGSPAQWLLYTHPTHSWQRADLGAY
LNPRPPAPEAWSEPVLLAKGSAAYSDLQSMGTGPDGSPLFGCLYEANDYEEIVFLMFTLKQA
FPAEYLPQEPKSSDKTHTCPPCPAPELLGGPSVFLFPPKPKDTLMISRTPEVTCVVVDVSHE
DPEVKFNWYVDGVEVHNAKTKPREEQYNSTYRVVSVLTVLHQDWLNGKEYKCKVSNKALPAP
IEKTISKAKGQPREPQVYTLPPSREEMTKNQVSLYCLVKGFYPSDIAVEWESNGQPENNYKT
TPPVLDSDGSFFLYSKLTVDKSRWQQGNVFSCSVMHEALHNHYTQKSLSLSPGK
SEQ ID NO: 144:
gatGCATCTCTGCCTTACCTGCAGAAAGAAAGCGTGTTCCAGTCTGGCGCCCACGCCTACAG
AATTCCCGCTCTGCTGTATCTGCCAGGCCAGCAGTCTCTGCTGGCTTTCGCTGAACAGCGGG
CCAGCAAGAAGGATGAGCACGCCGAACTGATCGTGCTGCGGAGAGGCGATTACGACGCCggc
ACACATCAGGTGCAGTGGCAGGCTCAAGAGGTGGTGGCTCAGGCTAGACTGGACGGCCACAG
ATCTATGAACCCCTGTCCTCTGTACGATgaaCAGACCGGCACACTGTTTCTGTTCTTTATCG
CTATCCCCGGCCAAGTGACCGAGCAGCAGCAGCTGCAGACAAGAGCCAACGTGACCAGACTG
TGTtacGTGACCTCCACCGACCACGGCAGAACCTGGTCTAGCCCTAGAGATCTGACCGACGC
CGCCATCGGACCTGCCTATAGAGAGTGGTCCACCTTCGCCGTTGGACCTGGACACTGTCTCC
AGCTGCACGACAGGGCTAGATCTCTGGTGGTGCCTGCCTACGCCTATAGAAAGCTGCACCCC
AAACAGCGGCCTATTCCTAGCGCCTTCTGCTTTCTGAGCCACGATCACGGCAGGACATGGGC
CAGAGGACATTTCGTGGCCCAGGACACACTGGAATGCCAGGTGGCCGAAGTGGAAACCGGCG
AGCAGAGAGTCGTGACCCTGAACGCCAGATCTCACCTGAGAGCCAGAGTGCAGGCCCAGAGC
ACAAACGACGGCCTGGATTTCCAAGAGAGCCAGCTGGTCAAGAAACTGGTGGAACCTCCTCC
AaccGGCTGTCAGGGAAGCGTGATCAGCTTTCCATCTCCTAGAAGCGGCCCTGGCTCTCCTG
CTCAGTGGCTGCTGTATACACACCCCACACACAGCTGGCAGAGAGCCGATCTGGGCGCCTAC
CTGAATCCTAGACCTCCTGCTCCTGAGGCTTGGAGCGAACCTGTTCTGCTGGCCAAGGGCAG
CgctGCCTACAGCGATCTGCAGTCTATGGGCACAGGCCCTGATGGCAGCCCTCTGTTTGGCT
GTCTGTACGAGGCCAACGACTACGAAGAGATCGTGTTCCTGATGTTCACCCTGAAGCAGGCC
TTTCCAGCCGAGTACCTGCCTCAAGAGCCCAAATCTTCTGACAAAACTCACACATGCCCACC
GTGCCCAGCACCTGAACTCCTGGGGGGACCGTCAGTCTTCCTCTTCCCCCCAAAACCCAAGG
ACACCCTCATGATCTCCCGGACCCCTGAGGTCACATGCGTGGTGGTGGACGTGAGCCACGAA
GACCCTGAGGTCAAGTTCAACTGGTACGTGGACGGCGTGGAGGTGCATAATGCCAAGACAAA
GCCGCGGGAGGAGCAGTACAACAGCACGTACCGTGTGGTCAGCGTCCTCACCGTCCTGCACC
AGGACTGGCTGAATGGCAAGGAGTACAAGTGCAAGGTCTCCAACAAAGCCCTCCCAGCCCCC
ATCGAGAAAACCATCTCCAAAGCCAAAGGGCAGCCCCGAGAACCACAGGTcTACACCCTGCC
CCCATCCCGGGAGGAGATGACCAAGAACCAGGTCAGCCTGtaCTGCCTGGTCAAAGGCTTCT
ATCCCAGCGACATCGCCGTGGAGTGGGAGAGCAATGGGCAGCCGGAGAACAACTACAAGACC
ACGCCTCCCGTGCTGGACTCCGACGGCTCCTTCTTCCTCtatAGCAAGCTCACCGTGGACAA
GAGCAGGTGGCAGCAGGGGAACGTCTTCTCATGCTCCGTGATGCATGAGGCTCTGCACAACC
ACTACACGCAGAAGAGCCTCTCCCTGTCTCCGGGTAAA
SEQ ID NO: 145:
DASLPYLQKESVFQSGAHAYRIPALLYLPGQQSLLAFAEQRASKKDEHAELIVLRRGDYDAG
THQVQWQAQEVVAQARLDGHRSMNPCPLYDEQTGTLFLFFIAIPGQVTEQQQLQTRANVTRL
CYVTSTDHGRTWSSPRDLTDAAIGPAYREWSTFAVGPGHCLQLHDRARSLVVPAYAYRKLHP
KQRPIPSAFCFLSHDHGRTWARGHFVAQDTLECQVAEVETGEQRVVTLNARSHLRFRVQAQS
TNDGLDFQESQLVKKLVEPPPTGCQGSVISFPSPRSGPGSPAQWLLYTHPTHSWQRADLGAY
LNPRPPAPEAWSEPVLLAKGSAAYSDLQSMGTGPDGSPLFGCLYEANDYEEIVFLMFTLKQA
FPAEYLPQEPKSSDKTHTCPPCPAPELLGGPSVFLFPPKPKDTLMISRTPEVTCVVVDVSHE
DPEVKFNWYVDGVEVHNAKTKPREEQYNSTYRVVSVLTVLHQDWLNGKEYKCKVSNKALPAP
IEKTISKAKGQPREPQVYTLPPSREEMTKNQVSLYCLVKGFYPSDIAVEWESNGQPENNYKT
TPPVLDSDGSFFLYSKLTVDKSRWQQGNVFSCSVMHEALHNHYTQKSLSLSPGK
SEQ ID NO: 146:
gatGCATCTCTGCCTTACCTGCAGAAAGAAAGCGTGTTCCAGTCTGGCGCCCACGCCTACAG
AATTCCCGCTCTGCTGTATCTGCCAGGCCAGCAGTCTCTGCTGGCTTTCGCTGAACAGCGGG
CCAGCAAGAAGGATGAGCACGCCGAACTGATCGTGCTGCGGAGAGGCGATTACGACGCCggc
ACACATCAGGTGCAGTGGCAGGCTCAAGAGGTGGTGGCTCAGGCTAGACTGGACGGCCACAG
ATCTATGAACCCCTGTCCTCTGTACGATgaaCAGACCGGCACACTGTTTCTGTTCTTTATCG
CTATCCCCGGCCAAGTGACCGAGCAGCAGCAGCTGCAGACAAGAGCCAACGTGACCAGACTG
TGTtacGTGACCTCCACCGACCACGGCAGAACCTGGTCTAGCCCTAGAGATCTGACCGACGC
CGCCATCGGACCTGCCTATAGAGAGTGGTCCACCTTCGCCGTTGGACCTGGACACTGTCTCC
AGCTGCACGACAGGGCTAGATCTCTGGTGGTGCCTGCCTACGCCTATAGAAAGCTGCACCCC
AAACAGCGGCCTATTCCTAGCGCCTTCTGCTTTCTGAGCCACGATCACGGCAGGACATGGGC
CAGAGGACATTTCGTGGCCCAGGACACACTGGAATGCCAGGTGGCCGAAGTGGAAACCGGCG
AGCAGAGAGTCGTGACCCTGAACGCCAGATCTCACCTGAGAttCAGAGTGCAGGCCCAGAGC
ACAAACGACGGCCTGGATTTCCAAGAGAGCCAGCTGGTCAAGAAACTGGTGGAACCTCCTCC
AaccGGCTGTCAGGGAAGCGTGATCAGCTTTCCATCTCCTAGAAGCGGCCCTGGCTCTCCTG
CTCAGTGGCTGCTGTATACACACCCCACACACAGCTGGCAGAGAGCCGATCTGGGCGCCTAC
CTGAATCCTAGACCTCCTGCTCCTGAGGCTTGGAGCGAACCTGTTCTGCTGGCCAAGGGCAG
CgctGCCTACAGCGATCTGCAGTCTATGGGCACAGGCCCTGATGGCAGCCCTCTGTTTGGCT
GTCTGTACGAGGCCAACGACTACGAAGAGATCGTGTTCCTGATGTTCACCCTGAAGCAGGCC
TTTCCAGCCGAGTACCTGCCTCAAGAGCCCAAATCTTCTGACAAAACTCACACATGCCCACC
GTGCCCAGCACCTGAACTCCTGGGGGGACCGTCAGTCTTCCTCTTCCCCCCAAAACCCAAGG
ACACCCTCATGATCTCCCGGACCCCTGAGGTCACATGCGTGGTGGTGGACGTGAGCCACGAA
GACCCTGAGGTCAAGTTCAACTGGTACGTGGACGGCGTGGAGGTGCATAATGCCAAGACAAA
GCCGCGGGAGGAGCAGTACAACAGCACGTACCGTGTGGTCAGCGTCCTCACCGTCCTGCACC
AGGACTGGCTGAATGGCAAGGAGTACAAGTGCAAGGTCTCCAACAAAGCCCTCCCAGCCCCC
ATCGAGAAAACCATCTCCAAAGCCAAAGGGCAGCCCCGAGAACCACAGGTcTACACCCTGCC
CCCATCCCGGGAGGAGATGACCAAGAACCAGGTCAGCCTGtaCTGCCTGGTCAAAGGCTTCT
ATCCCAGCGACATCGCCGTGGAGTGGGAGAGCAATGGGCAGCCGGAGAACAACTACAAGACC
ACGCCTCCCGTGCTGGACTCCGACGGCTCCTTCTTCCTCtatAGCAAGCTCACCGTGGACAA
GAGCAGGTGGCAGCAGGGGAACGTCTTCTCATGCTCCGTGATGCATGAGGCTCTGCACAACC
ACTACACGCAGAAGAGCCTCTCCCTGTCTCCGGGTAAA
SEQ ID NO: 147:
DASLPYLQDESVFQSGAHAYRIPALLYLPGQQSLLAFAEQRASKKDEHAELIVLRRGDYDAP
THQVQWQAQEVVAQARLDGHRSMNPCPLYDEQTGTLFLFFIAIPGQVTEQQQLQTRANVTRL
CQVTSTDHGRTWSSPRDLTDAAIGPAYREWSTFAVGPGHCLQLHDRARSLVVPAYAYRKLHP
KQRPIPSAFCFLSHDHGRTWARGHFVAQDTLANQVAEVETGEQRVVTLNARSHLRARVQAQS
TNDGLDFQESQLVKKLVEPPPQGCQGSVISFPSPRSGPGSPAQWLLYTHPTHSWQRADLGAY
LNPRPPAPEAWSEPVLLAKGSAAYSDLQSMGTGPDGSPLFGCLYEANDYEEIRFRMFTLKQA
FPAEYLPQGGGGSGGGGSDKTHTCPPCPAPELLGGPSVFLFPPKPKDTLMISRTPEVTCVVV
DVSHEDPEVKFNWYVDGVEVHNAKTKPREEQYNSTYRVVSVLTVLHQDWLNGKEYKCKVSNK
ALPAPIEKTISKAKGQPREPQVYTLPPSREEMTKNQVSLTCLVKGFYPSDIAVEWESNGQPE
NNYKTTPPVLDSDGSFFLTSKLTVDKSRWQQGNVFSCSVMHEALHNHYTQKSLSLSPGK
SEQ ID NO: 148:
GATGCATCTCTGCCTTACCTGCAGGATGAAAGCGTGTTCCAGTCTGGCGCCCACGCCTACAG
AATTCCCGCTCTGCTGTATCTGCCAGGCCAGCAGTCTCTGCTGGCTTTCGCTGAACAGCGGG
CCAGCAAGAAGGATGAGCACGCCGAACTGATCGTGCTGCGGAGAGGCGATTACGACGCCcct
ACACATCAGGTGCAGTGGCAGGCTCAAGAGGTGGTGGCTCAGGCTAGACTGGACGGCCACAG
ATCTATGAACCCCTGTCCTCTGTACGATGAACAGACCGGCACACTGTTTCTGTTCTTTATCG
CTATCCCCGGCCAAGTGACCGAGCAGCAGCAGCTGCAGACAAGAGCCAACGTGACCAGACTG
TGTCAAGTGACCTCCACCGACCACGGCAGAACCTGGTCTAGCCCTAGAGATCTGACCGACGC
CGCCATCGGACCTGCCTATAGAGAGTGGTCCACCTTCGCCGTTGGACCTGGACACTGTCTCC
AGCTGCACGACAGGGCTAGATCTCTGGTGGTGCCTGCCTACGCCTATAGAAAGCTGCACCCC
AAACAGCGGCCTATTCCTAGCGCCTTCTGCTTTCTGAGCCACGATCACGGCAGGACATGGGC
CAGAGGACATTTCGTGGCCCAGGACACACTGGCGAATCAGGTGGCCGAAGTGGAAACCGGCG
AGCAGAGAGTCGTGACCCTGAACGCCAGATCTCACCTGAGAGCCAGAGTGCAGGCCCAGAGC
ACAAACGACGGCCTGGATTTCCAAGAGAGCCAGCTGGTCAAGAAACTGGTGGAACCTCCTCC
ACAGGGCTGTCAGGGAAGCGTGATCAGCTTTCCATCTCCTAGAAGCGGCCCTGGCTCTCCTG
CTCAGTGGCTGCTGTATACACACCCCACACACAGCTGGCAGAGAGCCGATCTGGGCGCCTAC
CTGAATCCTAGACCTCCTGCTCCTGAGGCTTGGAGCGAACCTGTTCTGCTGGCCAAGGGCAG
CGCTGCCTACAGCGATCTGCAGTCTATGGGCACAGGCCCTGATGGCAGCCCTCTGTTTGGCT
GTCTGTACGAGGCCAACGACTACGAAGAGATCCGTTTCCGTATGTTCACCCTGAAGCAGGCC
TTTCCAGCCGAGTACCTGCCTCAAGGCGGAGGTGGAAGTGGCGGAGGCGGATCcGACAAAAC
TCACACATGCCCACCGTGCCCAGCACCTGAACTCCTGGGGGGACCGTCAGTCTTCCTCTTCC
CCCCAAAACCCAAGGACACCCTCATGATCTCCCGGACCCCTGAGGTCACATGCGTGGTGGTG
GACGTGAGCCACGAAGACCCTGAGGTCAAGTTCAACTGGTACGTGGACGGCGTGGAGGTGCA
TAATGCCAAGACAAAGCCGCGGGAGGAGCAGTACAACAGCACGTACCGTGTGGTCAGCGTCC
TCACCGTCCTGCACCAGGACTGGCTGAATGGCAAGGAGTACAAGTGCAAGGTCTCCAACAAA
GCCCTCCCAGCCCCCATCGAGAAAACCATCTCCAAAGCCAAAGGGCAGCCCCGAGAACCACA
GGTcTACACCCTGCCCCCATCCCGGGAGGAGATGACCAAGAACCAGGTCAGCCTGACCTGCC
TGGTCAAAGGCTTCTATCCCAGCGACATCGCCGTGGAGTGGGAGAGCAATGGGCAGCCGGAG
AACAACTACAAGACCACGCCTCCCGTGCTGGACTCCGACGGCTCCTTCTTCCTCacTAGCAA
GCTCACCGTGGACAAGAGCAGGTGGCAGCAGGGGAACGTCTTCTCATGCTCCGTGATGCATG
AGGCTCTGCACAACCACTACACGCAGAAGAGCCTCTCCCTGTCTCCGGGTAAA
SEQ ID NO: 149:
EVQLVESGGGLVQPGGSLRLSCAASGFNIKDTYIHWVRQAPGKGLEWVARIYPTNGYTRYAD
SVKGRFTISADTSKNTAYLQMNSLRAEDTAVYYCSRWGGDGFYAMDYWGQGTLVTVSSASTK
GPSVFPLAPSSKSTSGGTAALGCLVKDYFPEPVTVSWNSGALTSGVHTFPAVLQSSGLYSLS
SVVTVPSSSLGTQTYICNVNHKPSNTKVDKKVEPKSCDKTHTCPPCPAPELLGGPSVFLFPP
KPKDTLMISRTPEVTCVVVDVSHEDPEVKFNWYVDGVEVHNAKTKPREEQYNSTYRVVSVLT
VLHQDWLNGKEYKCKVSNKALPAPIEKTISKAKGQPREPQVYTLPPSREEMTKNQVSLTCLV
KGFYPSDIAVEWESNGQPENNYKTTPPVLDSDGSFFLTSKLTVDKSRWQQGNVFSCSVMHEA
LHNHYTQKSLSLSPGK
SEQ ID NO: 150:
GAGGTGCAGCTGGTTGAATCTGGCGGAGGACTGGTTCAGCCTGGCGGATCTCTGAGACTGTC
TTGTGCCGCCAGCGGCTTCAACATCAAGGACACCTACATCCACTGGGTCCGACAGGCCCCTG
GCAAAGGACTTGAATGGGTCGCCAGAATCTACCCCACCAACGGCTACACCAGATACGCCGAC
TCTGTGAAGGGCAGATTCACCATCAGCGCCGACACCAGCAAGAACACCGCCTACCTGCAGAT
GAACAGCCTGAGAGCCGAGGACACCGCCGTGTACTACTGTTCTAGATGGGGAGGCGACGGCT
TCTACGCCATGGATTATTGGGGCCAGGGCACCCTGGTCACCGTTTCTTCTGCtagcACCAAG
GGCCCATCcGTCTTCCCCCTGGCACCCTCCTCCAAGAGCACCTCTGGGGGCACAGCGGCCCT
GGGCTGCCTGGTCAAGGACTACTTCCCCGAACCGGTGACGGTGTCcTGGAACTCAGGCGCtC
TGACCAGCGGCGTGCACACCTTCCCGGCTGTCCTACAGTCCTCAGGACTCTACTCCCTCAGC
AGCGTGGTGACCGTGCCCTCCAGCAGCTTGGGCACCCAGACCTACATCTGCAACGTGAATCA
CAAGCCGAGCAACACCAAGGTGGAGAAGAAAGTTGAGCCCAAATCTTGTGAGAAAACTCACA
CATGCCCACCGTGCCCAGCACCTGAACTCCTGGGGGGACCGTCAGTCTTCCTCTTCCCCCCA
AAACCCAAGGACACCCTCATGATCTCCCGGACCCCTGAGGTCACATGCGTGGTGGTGGACGT
GAGCCACGAAGACCCTGAGGTCAAGTTCAACTGGTACGTGGACGGCGTGGAGGTGCATAATG
CCAAGACAAAGCCGCGGGAGGAGCAGTACAACAGCACGTACCGTGTGGTCAGCGTCCTCACC
GTCCTGCACCAGGACTGGCTGAATGGCAAGGAGTACAAGTGCAAGGTCTCCAACAAAGCCCT
CCCAGCCCCCATCGAGAAAACCATCTCCAAAGCCAAAGGGCAGCCCCGAGAACCACAGGTcT
ACACCCTGCCCCCATCCCGGGAGGAGATGACCAAGAACCAGGTCAGCCTGACCTGCCTGGTC
AAAGGCTTCTATCCCAGCGACATCGCCGTGGAGTGGGAGAGCAATGGGCAGCCGGAGAACAA
CTACAAGACCACGCCTCCCGTGCTGGACTCCGACGGCTCCTTCTTCCTCacTAGCAAGCTCA
CCGTGGACAAGAGCAGGTGGCAGCAGGGGAACGTCTTCTCATGCTCCGTGATGCATGAGGCT
CTGCACAACCACTACACGCAGAAGAGCCTCTCCCTGTCTCCGGGTAAA
SEQ ID NO: 151:
DASLPYLQKESVFQSGAHAYRIPALLYLPGQQSLLAFAEQRASKKDEHAELIVLRRGDYDAG
THQVQWQAQEVVAQARLDGHRSMNPCPLYDEQTGTLFLFFIAIPGQVTEQQQLQTRANVTRL
CYVTSTDHGRTWSSPRDLTDAAIGPAYREWSTFAVGPGHCLQLHDRARSLVVPAYAYRKLHP
KQRPIPSAFCFLSHDHGRTWARGHFVAQDTLECQVAEVETGEQRVVTLNARSHLRARVQAQS
TNDGLDFQESQLVKKLVEPPPQGCQGSVISFPSPRSGPGSPAQWLLYTHPTHSWQRADLGAY
LNPRPPAPEAWSEPVLLAKGSAAYSDLQSMGTGPDGSPLFGCLYEANDYEEIVFLMFTLKQA
FPAEYLPQ
SEQ ID NO: 152:
DASLPYLQKESVFQSGAHAYRIPALLYLPGQQSLLAFAEQRASKKDEHAELIVLRRGDYDAG
THQVQWQAQEVVAQARLDGHRSMNPCPLYDEQTGTLFLFFIAIPGQVTEQQQLQTRANVTRL
CYVTSTDHGRTWSSPRDLTDAAIGPAYREWSTFAVGPGHCLQLHDRARSLVVPAYAYRKLHP
KQRPIPSAFCFLSHDHGRTWARGHFVAQDTLECQVAEVETGEQRVVTLNARSHLRARVQAQS
TNDGLDFQESQLVKKLVEPPPQGCQGSVISFPSPRSGPGSPAQWLLYTHPTHSWQRADLGAY
LNPRPPAPEAWSEPVLLAKGSAAYSDLQSMGTGPDGSPLFGCLYEANDYEEIVFLMFTLKQA
FPAEYLPQEPKSSDKTHTCPPCPAPELLGGPSVFLFPPKPKDTLMISRTPEVTCVVVDVSHE
DPEVKFNWYVDGVEVHNAKTKPREEQYNSTYRVVSVLTVLHQDWLNGKEYKCKVSNKALPAP
IEKTISKAKGQPREPQVYTLPPSREEMTKNQVSLTCLVKGFYPSDIAVEWESNGQPENNYKT
TPPVLDSDGSFFLTSKLTVDKSRWQQGNVFSCSVMHEALHNHYTQKSLSLSPGK
SEQ ID NO: 153:
DASLPYLQKESVFQSGAHAYRIPALLYLPGQQSLLAFAEQRASKKDEHAELIVLRRGDYDAG
THQVQWQAQEVVAQARLDGHRSMNPCPLYDEQTGTLFLFFIAIPGQVTEQQQLQTRANVTRL
CYVTSTDHGRTWSSPRDLTDAAIGPAYREWSTFAVGPGHCLQLHDRARSLVVPAYAYRKLHP
KQRPIPSAFCFLSHDHGRTWARGHFVAQDTLECQVAEVETGEQRVVTLNARSHLRARVQAQS
TNDGLDFQESQLVKKLVEPPPQGCQGSVISFPSPRSGPGSPAQWLLYTHPTHSWQRADLGAY
LNPRPPAPEAWSEPVLLAKGSAAYSDLQSMGTGPDGSPLFGCLYEANDYEEIVFLMFTLKQA
FPAEYLPQEPKSSDKTHTCPPCPAPELLGGPSVFLFPPKPKDTLMISRTPEVTCVVVDVSHE
DPEVKFNWYVDGVEVHNAKTKPREEQYNSTYRVVSVLTVLHQDWLNGKEYKCKVSNKALPAP
IEKTISKAKGQPREPQVYTLPPSREEMTKNQVSLTCLVKGFYPSDIAVEWESNGQPENNYKT
TPPVLDSDGSFFLYSKLTVDKSRWQQGNVFSCSVMHEALHNHYTQKSLSLSPGKGGGGSGGG
GSGGGGSEVQLVESGGGLVQPGGSLRLSCAASGFNIKDTYIHWVRQAPGKGLEWVARIYPTN
GYTRYADSVKGRFTISADTSKNTAYLQMNSLRAEDTAVYYCSRWGGDGFYAMDYWGQGTLVT
VSSGGGGSGGGGSGGGGSDIQMTQSPSSLSASVGDRVTITCRASQDVNTAVAWYQQKPGKAP
KLLIYSASFLYSGVPSRFSGSRSGTDFTLTISSLQPEDFATYYCQQHYTTPPTFGQGTKVEI
K
SEQ ID NO: 154:
DASLPYLQKESVFQSGAHAYRIPALLYLPGQQSLLAFAEQRASKKDEHAELIVLRRGDYDAG
THQVQWQAQEVVAQARLDGHRSMNPCPLYDEQTGTLFLFFIAIPGQVTEQQQLQTRANVTRL
CYVTSTDHGRTWSSPRDLTDAAIGPAYREWSTFAVGPGHCLQLHDRARSLVVPAYAYRKLHP
KQRPIPSAFCFLSHDHGRTWARGHFVAQDTLECQVAEVETGEQRVVTLNARSHLRARVQAQS
TNDGLDFQESQLVKKLVEPPPQGCQGSVISFPSPRSGPGSPAQWLLYTHPTHSWQRADLGAY
LNPRPPAPEAWSEPVLLAKGSAAYSDLQSMGTGPDGSPLFGCLYEANDYEEIVFLMFTLKQA
FPAEYLPQGGGGSGGGGSDKTHTCPPCPAPELLGGPSVFLFPPKPKDTLMISRTPEVTCVVV
DVSHEDPEVKFNWYVDGVEVHNAKTKPREEQYNSTYRVVSVLTVLHQDWLNGKEYKCKVSNK
ALPAPIEKTISKAKGQPREPQVYTLPPSREEMTKNQVSLTCLVKGFYPSDIAVEWESNGQPE
NNYKTTPPVLDSDGSFFLTSKLTVDKSRWQQGNVFSCSVMHEALHNHYTQKSLSLSPGK
SEQ ID NO: 155:
DASLPYLQKESVFQSGAHAYRIPALLYLPGQQSLLAFAEQRASKKDEHAELIVLRRGDYDAG
THQVQWQAQEVVAQARLDGHRSMNPCPLYDEQTGTLFLFFIAIPGQVTEQQQLQTRANVTRL
CYVTSTDHGRTWSSPRDLTDAAIGPAYREWSTFAVGPGHCLQLHDRARSLVVPAYAYRKLHP
KQRPIPSAFCFLSHDHGRTWARGHFVAQDTLECQVAEVETGEQRVVTLNARSHLRARVQAQS
TNDGLDFQESQLVKKLVEPPPQGCQGSVISFPSPRSGPGSPAQWLLYTHPTHSWQRADLGAY
LNPRPPAPEAWSEPVLLAKGSAAYSDLQSMGTGPDGSPLFGCLYEANDYEEIVFLMFTLKQA
FPAEYLPQGGGGSGGGGSDKTHTCPPCPAPELLGGPSVFLFPPKPKDTLMISRTPEVTCVVV
DVSHEDPEVKFNWYVDGVEVHNAKTKPREEQYNSTYRVVSVLTVLHQDWLNGKEYKCKVSNK
ALPAPIEKTISKAKGQPREPQVYTLPPSREEMTKNQVSLTCLVKGFYPSDIAVEWESNGQPE
NNYKTTPPVLDSDGSFFLYSKLTVDKSRWQQGNVFSCSVMHEALHNHYTQKSLSLSPGKGGG
GSGGGGSGGGGSEVQLVESGGGLVQPGGSLRLSCAASGFNIKDTYIHWVRQAPGKGLEWVAR
IYPTNGYTRYADSVKGRFTISADTSKNTAYLQMNSLRAEDTAVYYCSRWGGDGFYAMDYWGQ
GTLVTVSSGGGGSGGGGSGGGGSDIQMTQSPSSLSASVGDRVTITCRASQDVNTAVAWYQQK
PGKAPKLLIYSASFLYSGVPSRFSGSRSGTDFTLTISSLQPEDFATYYCQQHYTTPPTFGQG
TKVEIK

What is claimed is:

1. A fusion protein comprising:
(a) a sialidase enzyme; and
(b) an anti-HER2 immunoglobulin antigen-binding domain.

2. The fusion protein of claim 1, wherein the sialidase is a human sialidase.

3. The fusion protein of claim 1 or 2, wherein the sialidase is a recombinant mutant human sialidase.

4. The fusion protein of claim 3, wherein the sialidase comprises:
(a) a substitution of a proline residue at a position corresponding to position 5 of wild-type human Neu2 (P5);
(b) a substitution of a lysine residue at a position corresponding to position 9 of wild-type human Neu2 (K9);
(c) a substitution of a lysine residue at a position corresponding to position 44 of wild-type human Neu2 (K44);
(d) a substitution of a lysine residue at a position corresponding to position 45 of wild-type human Neu2 (K45);
(e) a substitution of a leucine residue at a position corresponding to position 54 of wild-type human Neu2 (L54);
(f) a substitution of a proline residue at a position corresponding to position 62 of wild-type human Neu2 (P62);
(g) a substitution of a glutamine residue at a position corresponding to position 69 of wild-type human Neu2 (Q69);
(h) a substitution of an arginine residue at a position corresponding to position 78 of wild-type human Neu2 (R78);
(i) a substitution of an aspartic acid residue at a position corresponding to position 80 of wild-type human Neu2 (D80);
(j) a substitution of an alanine residue at a position corresponding to position 93 of wild-type human Neu2 (A93);
(k) a substitution of a glycine residue at a position corresponding to position 107 of wild-type human Neu2 (G107);
(l) a substitution of a glutamine residue at a position corresponding to position 108 of wild-type human Neu2 (Q108);
(m) a substitution of a glutamine residue at a position corresponding to position 112 of wild-type human Neu2 (Q112);
(n) a substitution of a cysteine residue at a position corresponding to position 125 of wild-type human Neu2 (C125);
(o) a substitution of a glutamine residue at a position corresponding to position 126 of wild-type human Neu2 (Q126);
(p) a substitution of an alanine residue at a position corresponding to position 150 of wild-type human Neu2 (A150);
(q) a substitution of a cysteine residue at a position corresponding to position 164 of wild-type human Neu2 (C164);
(r) a substitution of an arginine residue at a position corresponding to position 170 of wild-type human Neu2 (R170);
(s) a substitution of an alanine residue at a position corresponding to position 171 of wild-type human Neu2 (A171);
(t) a substitution of a glutamine residue at a position corresponding to position 188 of wild-type human Neu2 (Q188);
(u) a substitution of an arginine residue at a position corresponding to position 189 of wild-type human Neu2 (R189);
(v) a substitution of an alanine residue at a position corresponding to position 213 of wild-type human Neu2 (A213);
(w) a substitution of a leucine residue at a position corresponding to position 217 of wild-type human Neu2 (L217);
(x) a substitution of a glutamic acid residue at a position corresponding to position 225 of wild-type human Neu2 (E225);
(y) a substitution of a histidine residue at a position corresponding to position 239 of wild-type human Neu2 (H239);
(z) a substitution of a leucine residue at a position corresponding to position 240 of wild-type human Neu2 (L240);
(aa) a substitution of an arginine residue at a position corresponding to position 241 of wild-type human Neu2 (R241);
(bb) a substitution of an alanine residue at a position corresponding to position 242 of wild-type human Neu2 (A242);
(cc) a substitution of a valine residue at a position corresponding to position 244 of wild-type human Neu2 (V244);
(dd) a substitution of a threonine residue at a position corresponding to position 249 of wild-type human Neu2 (T249);
(ee) a substitution of an aspartic acid residue at a position corresponding to position 251 of wild-type human Neu2 (D251);
(ff) a substitution of a glutamic acid residue at a position corresponding to position 257 of wild-type human Neu2 (E257);
(gg) a substitution of a serine residue at a position corresponding to position 258 of wild-type human Neu2 (S258);
(hh) a substitution of a leucine residue at a position corresponding to position 260 of wild-type human Neu2 (L260);
(ii) a substitution of a valine residue at a position corresponding to position 265 of wild-type human Neu2 (V265);
(jj) a substitution of a glutamine residue at a position corresponding to position 270 of wild-type human Neu2 (Q270);
(kk) a substitution of a tryptophan residue at a position corresponding to position 292 of wild-type human Neu2 (W292);
(ll) a substitution of a serine residue at a position corresponding to position 301 of wild-type human Neu2 (S301);
(mm) a substitution of a tryptophan residue at a position corresponding to position 302 of wild-type human Neu2 (W302);
(nn) a substitution of a valine residue at a position corresponding to position 363 of wild-type human Neu2 (V363); or
(oo) a substitution of a leucine residue at a position corresponding to position 365 of wild-type human Neu2 (L365);
or a combination of any of the foregoing substitutions.

5. The fusion protein of claim 3 or 4, wherein the sialidase comprises:
(a) a substitution of a proline residue at a position corresponding to position 5 of wild-type human Neu2 (P5);
(b) a substitution of a lysine residue at a position corresponding to position 9 of wild-type human Neu2 (K9);
(c) a substitution of a lysine residue at a position corresponding to position 44 of wild-type human Neu2 (K44);
(d) a substitution of a lysine residue at a position corresponding to position 45 of wild-type human Neu2 (K45);
(e) a substitution of a leucine residue at a position corresponding to position 54 of wild-type human Neu2 (L54);
(f) a substitution of a proline residue at a position corresponding to position 62 of wild-type human Neu2 (P62);
(g) a substitution of a glutamine residue at a position corresponding to position 69 of wild-type human Neu2 (Q69);
(h) a substitution of an arginine residue at a position corresponding to position 78 of wild-type human Neu2 (R78);
(i) a substitution of an alanine residue at a position corresponding to position 93 of wild-type human Neu2 (A93);
(j) a substitution of a glycine residue at a position corresponding to position 107 of wild-type human Neu2 (G107);
(k) a substitution of a glutamine residue at a position corresponding to position 108 of wild-type human Neu2 (Q108);
(l) a substitution of a glutamine residue at a position corresponding to position 112 of wild-type human Neu2 (Q112);
(m) a substitution of a cysteine residue at a position corresponding to position 125 of wild-type human Neu2 (C125);
(n) a substitution of a glutamine residue at a position corresponding to position 126 of wild-type human Neu2 (Q126);
(o) a substitution of an alanine residue at a position corresponding to position 150 of wild-type human Neu2 (A150);
(p) a substitution of a cysteine residue at a position corresponding to position 164 of wild-type human Neu2 (C164);
(q) a substitution of an alanine residue at a position corresponding to position 171 of wild-type human Neu2 (A171);
(r) a substitution of a leucine residue at a position corresponding to position 217 of wild-type human Neu2 (L217);
(s) a substitution of a threonine residue at a position corresponding to position 249 of wild-type human Neu2 (T249);
(t) a substitution of an aspartic acid residue at a position corresponding to position 251 of wild-type human Neu2 (D251);
(u) a substitution of a glutamine residue at a position corresponding to position 270 of wild-type human Neu2 (Q270);
(v) a substitution of a tryptophan residue at a position corresponding to position 292 of wild-type human Neu2 (W292);
(w) a substitution of a serine residue at a position corresponding to position 301 of wild-type human Neu2 (S301);
(x) a substitution of a tryptophan residue at a position corresponding to position 302 of wild-type human Neu2 (W302);
(y) a substitution of a valine residue at a position corresponding to position 363 of wild-type human Neu2 (V363); or
(z) a substitution of a leucine residue at a position corresponding to position 365 of wild-type human Neu2 (L365);
or a combination of any of the foregoing substitutions.

6. The fusion protein of claim 4 or 5, wherein the sialidase comprises a substitution of K9, P62, A93, Q216, A242, Q270, 5301, W302, V363, or L365, or a combination of any of the foregoing substitutions.

7. The fusion protein of any one of claims 4-6, wherein the sialidase comprises a substitution of K9, P62, A93, Q270, 5301, W302, V363, or L365, or a combination of any of the foregoing substitutions.

8. The fusion protein of any one of claims 4-7, wherein, in the sialidase:
(a) the proline residue at a position corresponding to position 5 of wild-type human Neu2 is substituted by histidine (P5H);
(b) the lysine residue at a position corresponding to position 9 of wild-type human Neu2 is substituted by aspartic acid (K9D);
(c) the lysine residue at a position corresponding to position 44 of wild-type human Neu2 is substituted by arginine (K44R) or glutamic acid (K44E);
(d) the lysine residue at a position corresponding to position 45 of wild-type human Neu2 is substituted by alanine (K45A), arginine (K45R), or glutamic acid (K45E);
(e) the leucine residue at a position corresponding to position 54 of wild-type human Neu2 is substituted by methionine (L54M);
(f) the proline residue at a position corresponding to position 62 of wild-type human Neu2 is substituted by asparagine (P62N), aspartic acid (P62D), histidine (P62H), glutamic acid (P62E), glycine (P62G), serine (P62S), or threonine (P62T);
(g) the glutamine residue at a position corresponding to position 69 of wild-type human Neu2 is substituted by histidine (Q69H);
(h) the arginine residue at a position corresponding to position 78 of wild-type human Neu2 is substituted by lysine (R78K);
(i) the aspartic acid residue at a position corresponding to position 80 of wild-type human Neu2 is substituted by proline (D80P);
(j) the alanine residue at a position corresponding to position 93 of wild-type human Neu2 is substituted by glutamic acid (A93E) or lysine (A93K);
(k) the glycine residue at a position corresponding to position 107 of wild-type human Neu2 is substituted by aspartic acid (G107D);
(l) the glutamine residue at a position corresponding to position 108 of wild-type human Neu2 is substituted by histidine (Q108H);
(m) the glutamine residue at a position corresponding to position 112 of wild-type human Neu2 is substituted by arginine (Q112R) or lysine (Q112K);
(n) the cysteine residue at a position corresponding to position 125 of wild-type human Neu2 is substituted by leucine (C125L);
(o) the glutamine residue at a position corresponding to position 126 of wild-type human Neu2 is substituted by leucine (Q126L), glutamic acid (Q126E), phenylalanine (Q126F), histidine (Q126H), isoleucine (Q1261), or tyrosine (Q126Y);
(p) the alanine residue at a position corresponding to position 150 of wild-type human Neu2 is substituted by valine (A150V);
(q) the cysteine residue at a position corresponding to position 164 of wild-type human Neu2 is substituted by glycine (C164G);
(r) the arginine residue at a position corresponding to position 170 of wild-type human Neu2 is substituted by proline (R170P);
(s) the alanine residue at a position corresponding to position 171 of wild-type human Neu2 is substituted by glycine (A171G);
(t) the glutamine residue at a position corresponding to position 188 of wild-type human Neu2 is substituted by proline (Q188P);
(u) the arginine residue at a position corresponding to position 189 of wild-type human Neu2 is substituted by proline (R189P);
(v) the alanine residue at a position corresponding to position 213 of wild-type human Neu2 is substituted by cysteine (A213C), asparagine (A213N), serine (A213S) or threonine (A213 T);
(w) the leucine residue at a position corresponding to position 217 of wild-type human Neu2 is substituted by alanine (L217A) or valine (L217V);
(x) the threonine residue at a position corresponding to position 249 of wild-type human Neu2 is substituted by alanine (T249A);
(y) the aspartic acid residue at a position corresponding to position 251 of wild-type human Neu2 is substituted by glycine (D251G);
(z) the glutamic acid residue at a position corresponding to position 225 of wild-type human Neu2 is substituted by proline (E225P);
(aa) the histidine residue at a position corresponding to position 239 of wild-type human Neu2 is substituted by proline (H239P);
(bb) the leucine residue at a position corresponding to position 240 of wild-type human Neu2 is substituted by aspartic acid (L240D), asparagine (L240N), or tyrosine (L240Y);
(cc) the arginine residue at a position corresponding to position 241 of wild-type human Neu2 is substituted by alanine (R241A), aspartic acid (R241D), leucine (R241L), glutamine (R241Q), or tyrosine (R241Y);
(dd) the alanine residue at a position corresponding to position 242 of wild-type human Neu2 is substituted by cysteine (A242C), phenylalanine (A242F), glycine (A242G), histidine (A242H), isoleucine (A242I), lysine (A242K), leucine (A242L), methionine (A242M), asparagine (A242N), glutamine (A242Q), arginine (A242R), serine (A242S), valine (A242V), tryptophan (A242W), or tyrosine (A242Y);
(ee) the valine residue at a position corresponding to position 244 of wild-type human Neu2 is substituted by isoleucine (V244I) or proline (V244P);
(ff) the glutamic acid residue at a position corresponding to position 257 of wild-type human Neu2 is substituted by proline (E257P);
(gg) the serine residue at a position corresponding to position 258 is substituted by cysteine (S258C);
(hh) the leucine residue at a position corresponding to position 260 of wild-type human Neu2 is substituted by aspartic acid (L260D), phenylalanine (L260F), glutamine (L260Q), or threonine (L260T);
(ii) the valine residue at a position corresponding to position 265 of wild-type human Neu2 is substituted by phenylalanine (V265F);
(jj) the glutamine residue at a position corresponding to position 270 of wild-type human Neu2 is substituted by alanine (Q270A), histidine (Q270H), phenylalanine (Q270F), proline (Q270P), serine (Q270S), or threonine (Q270T);
(kk) the tryptophan residue at a position corresponding to position 292 of wild-type human Neu2 is substituted by arginine (W292R);
(ll) the serine residue at a position corresponding to position 301 of wild-type human Neu2 is substituted by alanine (S301A), aspartic acid (S301D), glutamic acid (S301E), phenylalanine (S301F), histidine (S301H), lysine (S301K), leucine (S301L), methionine (S301M), asparagine (S301N), proline (S301P), glutamine (S301Q), arginine (S301R), threonine (S301T), valine (S301V), tryptophan (S301W), or tyrosine (S301Y);
(mm) the tryptophan residue at a position corresponding to position 302 of wild-type human Neu2 is substituted by alanine (W302A), aspartic acid (W302D), phenylalanine (W302F), glycine (W302G), histidine (W302H), isoleucine (W302I), lysine (W302K), leucine (W302L), methionine (W302M), asparagine (W302N), proline (W302P), glutamine (W302Q), arginine (W302R), serine (W302S), threonine (W302T), valine (W302V), or tyrosine (W302Y);
(nn) the valine residue at a position corresponding to position 363 of wild-type human Neu2 is substituted by arginine (V363R); or
(oo) the leucine residue at a position corresponding to position 365 of wild-type human Neu2 is substituted by glutamine (L365Q), histidine (L365H), isoleucine (L365I), lysine (L365K) or serine (L365S);
or the sialidase comprises a combination of any of the foregoing substitutions.

9. The fusion protein of any one of claims 4-8, wherein, in the sialidase:
(a) the proline residue at a position corresponding to position 5 of wild-type human Neu2 is substituted by histidine (P5H);
(b) the lysine residue at a position corresponding to position 9 of wild-type human Neu2 is substituted by aspartic acid (K9D);
(c) the lysine residue at a position corresponding to position 44 of wild-type human Neu2 is substituted by arginine (K44R) or glutamic acid (K44E);
(d) the lysine residue at a position corresponding to position 45 of wild-type human Neu2 is substituted by alanine (K45A), arginine (K45R), or glutamic acid (K45E);
(e) the leucine residue at a position corresponding to position 54 of wild-type human Neu2 is substituted by methionine (L54M);
(f) the proline residue at a position corresponding to position 62 of wild-type human Neu2 is substituted by asparagine (P62N), aspartic acid (P62D), histidine (P62H), glutamic acid (P62E), glycine (P62G), serine (P62S), or threonine (P62T);
(g) the glutamine residue at a position corresponding to position 69 of wild-type human Neu2 is substituted by histidine (Q69H);
(h) the arginine residue at a position corresponding to position 78 of wild-type human Neu2 is substituted by lysine (R78K);
(i) the alanine residue at a position corresponding to position 93 of wild-type human Neu2 is substituted by glutamic acid (A93E) or lysine (A93K);
(j) the glycine residue at a position corresponding to position 107 of wild-type human Neu2 is substituted by aspartic acid (G107D);
(k) the glutamine residue at a position corresponding to position 108 of wild-type human Neu2 is substituted by histidine (Q108H);
(l) the glutamine residue at a position corresponding to position 112 of wild-type human Neu2 is substituted by arginine (Q112R) or lysine (Q112K);
(m) the cysteine residue at a position corresponding to position 125 of wild-type human Neu2 is substituted by leucine (C125L);
(n) the glutamine residue at a position corresponding to position 126 of wild-type human Neu2 is substituted by leucine (Q126L);
(o) the alanine residue at a position corresponding to position 150 of wild-type human Neu2 is substituted by valine (A150V);
(p) the cysteine residue at a position corresponding to position 164 of wild-type human Neu2 is substituted by glycine (C164G);
(q) the alanine residue at a position corresponding to position 171 of wild-type human Neu2 is substituted by glycine (A171G);
(r) the leucine residue at a position corresponding to position 217 of wild-type human Neu2 is substituted by alanine (L217A) or valine (L217V);
(s) the threonine residue at a position corresponding to position 249 of wild-type human Neu2 is substituted by alanine (T249A);
(t) the aspartic acid residue at a position corresponding to position 251 of wild-type human Neu2 is substituted by glycine (D251G);
(u) the glutamine residue at a position corresponding to position 270 of wild-type human Neu2 is substituted by alanine (Q270A), histidine (Q270H), phenylalanine (Q270F) or proline (Q270P);
(v) the tryptophan residue at a position corresponding to position 292 of wild-type human Neu2 is substituted by arginine (W292R);
(w) the serine residue at a position corresponding to position 301 of wild-type human Neu2 is substituted by arginine (S301R);
(x) the tryptophan residue at a position corresponding to position 302 of wild-type human Neu2 is substituted by lysine (W302K);
(y) the valine residue at a position corresponding to position 363 of wild-type human Neu2 is substituted by arginine (V363R); or
(z) the leucine residue at a position corresponding to position 365 of wild-type human Neu2 is substituted by glutamine (L365Q), histidine (L365H), isoleucine (L365I), lysine (L365K) or serine (L365S);
or the sialidase comprises a combination of any of the foregoing substitutions.

10. The fusion protein of claim 8 or 9, wherein the sialidase comprises a substitution selected from K9D, P62G, P62N, P62S, P62T, A93E, Q126Y, A242F, A242W, A242Y, Q270A, Q270T, S301A, S301R, W302K, W302R, V363R, and L365I, or a combination of any of the foregoing substitutions.

11. The fusion protein of any one of claims 8-10, wherein the sialidase comprises a substitution selected from K9D, P62G, P62N, P62S, P62T, A93E, Q270A, S301R, W302K, V363R, and L365I, or a combination of any of the foregoing substitutions.

12. The fusion protein of any one of claims 1-11, wherein the sialidase comprises:
(a) a substitution or deletion of a methionine residue at a position corresponding to position 1 of wild-type human Neu2 (M1);
(b) a substitution of a valine residue at a position corresponding to position 6 of wild-type human Neu2 (V6);
(c) a substitution of an isoleucine residue at a position corresponding to position 187 of wild-type human Neu2 (I187); or
(d) a substitution of a cysteine residue at a position corresponding to position 332 of wild-type human Neu2 (C332);
or a combination of any of the foregoing substitutions.

13. The fusion protein of claim 12, wherein, in the sialidase:
(a) the methionine residue at a position corresponding to position 1 of wild-type human Neu2 is deleted (AM1), is substituted by alanine (M1A), or is substituted by aspartic acid (M1D);
(b) the valine residue at a position corresponding to position 6 of wild-type human Neu2 is substituted by tyrosine (V6Y);
(c) the isoleucine residue at a position corresponding to position 187 of wild-type human Neu2 is substituted by lysine (I187K); or
(d) the cysteine residue at a position corresponding to position 332 of wild-type human Neu2 is substituted by alanine (C332A);
or the sialidase comprises a combination of any of the foregoing substitutions.

14. The fusion protein of claim 13, wherein the sialidase comprises:
(a) the M1D, V6Y, P62G, A93E, I187K, and C332A substitutions;
(b) the M1D, V6Y, K9D, A93E, I187K, C332A, V363R, and L365I substitutions;
(c) the M1D, V6Y, P62N, I187K, and C332A substitutions;
(d) the M1D, V6Y, I187K, Q270A, S301R, W302K, and C332A substitutions;
(e) the M1D, V6Y, P62S, I187K, Q270A, S301R, W302K, and C332A substitutions;
(f) the M1D, V6Y, P62T, I187K, Q270A, S301R, W302K, and C332A substitutions;
(g) the M1D, V6Y, P62N, I187K, Q270A, S301R, W302K, and C332A substitutions;
(h) the M1D, V6Y, P62G, A93E, I187K, S301A, W302R, and C332A substitutions;
(i) the M1D, V6Y, P62G, A93E, Q126Y, I187K, Q270T, and C332A substitutions;
(j) the M1D, V6Y, P62G, A93E, Q126Y, I187K, and C332A substitutions; or
(k) the M1D, V6Y, P62G, A93E, Q126Y, I187K, A242F, Q270T, and C332A substitutions.

15. The fusion protein of claim 13 or 14, wherein the sialidase comprises:
(a) the M1D, V6Y, P62G, A93E, I187K, and C332A substitutions;
(b) the M1D, V6Y, K9D, A93E, I187K, C332A, V363R, and L365I substitutions;
(c) the M1D, V6Y, P62N, I187K, and C332A substitutions;
(d) the M1D, V6Y, I187K, Q270A, S301R, W302K, and C332A substitutions;
(e) the M1D, V6Y, P62S, I187K, Q270A, S301R, W302K, and C332A substitutions;
(f) the M1D, V6Y, P62T, I187K, Q270A, S301R, W302K, and C332A substitutions; or
(g) the M1D, V6Y, P62N, I187K, Q270A, S301R, W302K, and C332A substitutions.

16. The fusion protein of any one of claims 1-15, wherein the sialidase is selected from Neu1, Neu2, Neu3, and Neu4.

17. The fusion protein of claim 16, wherein the sialidase is Neu2.

18. The fusion protein of any one of claims 1-17, wherein the sialidase has a different substrate specificity than the corresponding wild-type sialidase.

19. The fusion protein of claim 18, wherein the sialidase can cleave α2,3, α2,6, and/or α2,8 linkages.

20. The fusion protein of claim 19, wherein the sialidase can cleave α2,3 and α2,8 linkages.

21. The fusion protein of any one of claims 1-20, wherein the sialidase comprises any one of SEQ ID NOs: 48-62, 111, 114, 117, or 151.

22. The fusion protein of any one of claims 1-21, wherein the sialidase comprises any one of SEQ ID NOs: 48-54.

23. The fusion protein of any one of claims 1-22, wherein the sialidase comprises a mutation set forth in any one of Tables 5-12 or 14-27.

24. The fusion protein of any one of claims 1-23, wherein the sialidase comprises a mutation set forth in any one of Tables 1-4.

25. The fusion protein of any one of claims 1-24, wherein the fusion protein further comprises an immunoglobulin Fc domain.

26. The fusion protein of claim 25, wherein the immunoglobulin Fc domain is derived from a human IgG1, IgG2, IgG3, IgG4, IgA1, IgA2, IgD, IgE, or IgM Fc domain.

27. The fusion protein of claim 26, wherein the immunoglobulin Fc domain is derived from a human IgG1, IgG2, IgG3, or IgG4 Fc domain.

28. The fusion protein of claim 27, wherein the immunoglobulin Fc domain is derived from a human IgG1 Fc domain.

29. The fusion protein of any one of claims 1-28, wherein the anti-HER2 immunoglobulin antigen-binding domain is associated with a second anti-HER2 immunoglobulin antigen-binding domain to produce an anti-HER2 antigen-binding site.

30. The fusion protein of any one of claims 1-29, wherein the anti-HER2 immunoglobulin antigen-binding domain is derived from an antibody selected from trastuzumab, pertuzumab, CT-P6, trastuzumab-dkst, MGAH22 (margetuximab), PF-05280014, ertumaxomab, gancotamab, timigutuzumab, Ontruzant, ABP-980, SB3, DS-8201, MYL-1410, BCD-022, and HD201.

31. The fusion protein of claim 30, wherein the anti-HER2 immunoglobulin antigen-binding domain is derived from trastuzumab.

32. The fusion protein of any one of claims 1-31, wherein the sialidase and the immunoglobulin Fc domain and/or the anti-HER2 immunoglobulin antigen-binding domain are linked by a peptide bond or an amino acid linker.

33. The fusion protein of any one of claims 1-32, wherein the fusion protein comprises any one of SEQ ID NOs: 66-85, 98-106, 112, 113, 115, 116, 118, 119, 122-134, 141, 143, 145, 147, or 152-155.

34. The fusion protein of any one of claims 1-33, wherein the fusion protein comprises any one of SEQ ID NOs: 66-85 or 98-106.

35. An antibody conjugate comprising the fusion protein of any one of claims 1-34.

36. The antibody conjugate of claim 35, wherein the antibody conjugate comprises a single sialidase.

37. The antibody conjugate of claim 35, wherein the antibody conjugate comprises two sialidases.

38. The antibody conjugate of claim 37, wherein the two sialidases are identical.

39. The antibody conjugate of any one of claims 35-38, wherein the antibody conjugate comprises a single anti-HER2 antigen-binding site.

40. The antibody conjugate of any one of claims 35-38, wherein the antibody conjugate comprises two anti-HER2 antigen-binding sites.

41. The antibody conjugate of claim 40, wherein the two anti-HER2 antigen-binding sites are identical.

42. The antibody conjugate of any one of claims 35-41, wherein the antibody conjugate has a molecular weight from about 135 kDa to about 165 kDa.

43. The antibody conjugate of any one of claims 35-41, wherein the antibody conjugate has a molecular weight from about 215 kDa to about 245 kDa.

44. The antibody conjugate of any one of claims 35-43, wherein the antibody conjugate comprises:
(a) a first polypeptide comprising an immunoglobulin light chain;
(b) a second polypeptide comprising an immunoglobulin heavy chain; and
(c) a third polypeptide comprising an immunoglobulin Fc domain and a sialidase;
wherein the first and second polypeptides are covalently linked together and the second and third polypeptides are linked together, and wherein the first polypeptide and the second polypeptide together define an anti-HER2 antigen-binding site.

45. The antibody conjugate of claim 44, wherein the third polypeptide comprises the sialidase and the immunoglobulin Fc domain in an N- to C-terminal orientation.

46. The antibody conjugate of claim 44 or 45, wherein the first polypeptide comprises SEQ ID NO: 66.

47. The antibody conjugate of any one of claims 44-46, wherein the second polypeptide comprises any one of SEQ ID NOs: 67 or 149.

48. The antibody conjugate of any one of claims 44-47, wherein the second polypeptide comprises SEQ ID NO: 67.

49. The antibody conjugate of any one of claims 44-48, wherein the third polypeptide comprises any one of SEQ ID NOs: 68-74, 98-104, 112, 113, 115, 116, 118, 119, 141, 143, 145, 147, 152, or 154.

50. The antibody conjugate of any one of claims 44-49, wherein the third polypeptide comprises any one of SEQ ID NOs: 68-74 or 98-104.

51. The antibody conjugate of any one of claims 35-43, wherein the fusion protein comprises:
(a) a first polypeptide comprising a first immunoglobulin light chain;
(b) a second polypeptide comprising a first immunoglobulin heavy chain and a first sialidase;
(c) a third polypeptide comprising a second immunoglobulin heavy chain and a second sialidase; and
(d) a fourth polypeptide comprising a second immunoglobulin light chain;
wherein the first and second polypeptides are covalently linked together, the third and fourth polypeptides are covalently linked together, and the second and third polypeptides are covalently linked together, and wherein the first polypeptide and the second polypeptide together define a first anti-HER2 antigen-binding site, and the third polypeptide and the fourth polypeptide together define a second anti-HER2 antigen-binding site.

52. The antibody conjugate of claim 51, wherein the second and third polypeptides comprise the first and second immunoglobulin heavy chain and the first and second sialidase, respectively, in an N- to C-terminal orientation.

53. The antibody conjugate of any one of claims 35-43, wherein the fusion protein comprises:
(a) a first polypeptide comprising a first sialidase, a first immunoglobulin Fc domain, and a first single chain variable fragment (scFv); and
(b) a second polypeptide comprising a second sialidase, a second immunoglobulin Fc domain, and a second single chain variable fragment (scFv);
wherein the first and second polypeptides are covalently linked together, and wherein the first scFv defines a first anti-HER2 antigen-binding site, and the second scFv defines a second anti-HER2 antigen-binding site.

54. The antibody conjugate of claim 53, wherein the first polypeptide comprises the first sialidase, the first immunoglobulin Fc domain, and the first scFv in an N- to C-terminal orientation, and the second polypeptide comprises the second sialidase, the second immunoglobulin Fc domain, and the second scFv in an N- to C-terminal orientation.

55. The antibody conjugate of claim 53 or 54, wherein the first polypeptide comprises any one of SEQ ID NOs: 77-83, 122-134, 153, or 155.

56. The antibody conjugate of any one of claims 53-55, wherein the second polypeptide comprises any one of SEQ ID NOs: 77-83, 122-134, 153, or 155.

57. The antibody conjugate of any one of claims 53-56, wherein the first polypeptide comprises any one of SEQ ID NOs: 77-83.

58. The antibody conjugate of any one of claims 53-57, wherein the second polypeptide comprises any one of SEQ ID NOs: 77-83.

59. The antibody conjugate of any one of claims 35-43, wherein the antibody conjugate comprises:
(a) a first polypeptide comprising an immunoglobulin light chain;
(b) a second polypeptide comprising an immunoglobulin heavy chain and a single chain variable fragment (scFv); and
(c) a third polypeptide comprising an immunoglobulin Fc domain and a sialidase;
wherein the first and second polypeptides are covalently linked together and the second and third polypeptides are covalently linked together, and wherein the immunoglobulin light chain and immunoglobulin heavy chain together define a first anti-HER2 antigen-binding site and the scFv defines a second anti-HER2 antigen-binding site.

60. The antibody conjugate of claim 59, wherein the second polypeptide comprises the immunoglobulin heavy chain and the scFv in an N- to C-terminal orientation, and the third polypeptide comprises the sialidase and the immunoglobulin Fc domain in an N- to C-terminal orientation.

61. An isolated nucleic acid comprising a nucleotide sequence encoding the fusion protein of any one of claims 1-34, or at least a portion of the antibody conjugate of any one of claims 35-59.

62. An expression vector comprising the nucleic acid of claim 61.

63. A host cell comprising the expression vector of claim 62.

64. A pharmaceutical composition comprising the fusion protein of any one of claims 1-34 or the antibody conjugate of any one of claims 35-59.

65. A method of treating cancer in a subject in need thereof, the method comprising administering to the subject an effective amount of the fusion protein of any one of claims 1-34, the antibody conjugate of any one of claims 35-59, or the pharmaceutical composition of claim 64.

66. The method of claim 65, wherein the cancer is selected from lung bronchioloalveolar carcinoma (BAC), bladder cancer, a female genital tract malignancy (e.g., uterine serous carcinoma, endometrial carcinoma, vulvar squamous cell carcinoma, and uterine sarcoma), an ovarian surface epithelial carcinoma (e.g., clear cell carcinoma of the ovary, epithelial ovarian cancer, fallopian tube cancer, and primary peritoneal cancer), breast carcinoma, non-small cell lung cancer (NSCLC), a male genital tract malignancy (e.g., testicular cancer), retroperitoneal or peritoneal carcinoma, gastroesophageal adenocarcinoma, esophagogastric junction carcinoma, liver hepatocellular carcinoma, esophageal and esophagogastric junction carcinoma, cervical cancer, cholangiocarcinoma, pancreatic adenocarcinoma, extrahepatic bile duct adenocarcinoma, a small intestinal malignancy, gastric adenocarcinoma, cancer of unknown primary (CUP), colorectal adenocarcinoma, esophageal carcinoma, prostatic adenocarcinoma, kidney cancer, head and neck squamous carcinoma, thymic carcinoma, non-melanoma skin cancer, thyroid carcinoma (e.g., papillary carcinoma), a head and neck cancer, anal carcinoma, non-epithelial ovarian cancer (non-EOC), uveal melanoma, malignant pleural mesothelioma, small cell lung cancer (SCLC), a central nervous system cancer, a neuroendocrine tumor, and a soft tissue tumor.

67. The method of claim 65 or 66, wherein the cancer is breast cancer.

68. The method of claim 65 or 66, wherein the cancer is non-small cell lung cancer.

69. The method of claim 65 or 66, wherein the cancer is bladder cancer.

70. The method of claim 65 or 66, wherein the cancer is kidney cancer.

71. The method of claim 65 or 66, wherein the cancer is colon cancer.

72. The method of claim 65 or 66, wherein the cancer is melanoma.

73. A method of promoting infiltration of immune cells into a tumor in a subject in need thereof, the method comprising administering to the subject an effective amount of the fusion protein of any one of claims 1-34, the antibody conjugate of any one of claims 35-59, or the pharmaceutical composition of claim 64.

74. The method of claim 73, wherein the immune cells are T-cells.

75. The method of claim 74, wherein the T-cells are CD4+ T-cells and/or CD8+ T-cells.

76. The method of claim 75, wherein the CD8+ T-cells are CD69⁺CD8⁺ and/or GzmB⁺CD8⁺ T-cells.

77. The method of claim 73, wherein the immune cells are natural killer (NK) cells.

78. A method of increasing the number of circulating natural killer (NK) cells in a subject in need thereof, the method comprising administering to the subject an effective amount of the fusion protein of any one of claims 1-34, the antibody conjugate of any one of claims 35-59, or the pharmaceutical composition of claim 64, so as to increase the number of circulating NK cells relative to prior to administration of the fusion protein, antibody conjugate or pharmaceutical composition.

79. A method of increasing the number of T-cells in the draining lymph node in subject in need thereof, the method comprising administering to the subject an effective amount of the fusion protein of any one of claims 1-34, the antibody conjugate of any one of claims 35-59, or the pharmaceutical composition of claim 64, so as to increase the number of T-cells in the draining lymph node relative to prior to administration of the fusion protein, antibody conjugate or pharmaceutical composition.

80. The method of claim 79, wherein the T-cells are CD4+ T-cells and/or CD8+ T-cells.

81. A method of increasing expression of Cd3, Cd4, Cd8, Cd274, Ctla4, Icos, Pdcd1, Lag3, Il6, Il1b, Il2, Ifng, Ifna1, Mx1, Gzmb, Cxcl9, Cxcl12, and/or Ccl5 in a cell, tissue, or subject, the method comprising contacting the cell, tissue, or subject with an effective amount of the fusion protein of any one of claims 1-34, the antibody conjugate of any one of claims 35-59, or the pharmaceutical composition of claim 64, so as to increase the expression of Cd3, Cd4, Cd8, Cd274, Ctla4, Icos, Pdcd1, Lag3, Il6, Il1b, Il2, Ifng, Ifna1, Mx1, Gzmb, Cxcl9, Cxcl12, and/or Ccl5 relative to the cell, tissue or subject prior to contact with the fusion protein, antibody conjugate or pharmaceutical composition.

The application's sequence listing, which the Patent Office published only in electronic form, follows.

SEQUENCE LISTING (172 sequences)

SEQ ID NO: 1 - protein, 380 aa, Homo sapiens
MASLPVLQKESVFQSGAHAYRIPALLYLPGQQSLLAFAEQRASKKDEHAELIVLRRGDYDAPTHQVQWQAQEVVAQARLDGHRSMNPCPLYDAQTGTLFLFFIAIPGQVTEQQQLQTRANVTRLCQVTSTDHGRTWSSPRDLTDAAIGPAYREWSTFAVGPGHCLQLHDRARSLVVPAYAYRKLHPIQRPIPSAFCFLSHDHGRTWARGHFVAQDTLECQVAEVETGEQRVVTLNARSHLRARVQAQSTNDGLDFQESQLVKKLVEPPPQGCQGSVISFPSPRSGPGSPAQWLLYTHPTHSWQRADLGAYLNPRPPAPEAWSEPVLLAKGSCAYSDLQSMGTGPDGSPLFGCLYEANDYEEIVFLMFTLKQAFPAEYLPQ

SEQ ID NO: 2 - protein, 385 aa, Mus musculus
MEDLRPMATCPVLQKETLFRTGVHAYRIPALLYLKKQKTLLAFAEKRASKTDEHAELIVLRRGSYNEATNRVKWQPEEVVTQAQLEGHRSMNPCPLYDKQTKTLFLFFIAVPGRVSEHHQLHTKVNVTRLCCVSSTDHGRTWSPIQDLTETTIGSTHQEWATFAVGPGHCLQLRNPAGSLLVPAYAYRKLHPAQKPTPFAFCFISLDHGHTWKLGNFVAENSLECQVAEVGTGAQRMVYLNARSFLGARVQAQSPNDGLDFQDNRVVSKLVEPPHGCHGSVVAFHNPISKPHALDTWLLYTHPTDSRNRTNLGVYLNQMPLDPTAWSEPTLLAMGICAYSDLQNMGQGPDGSPQFGCLYESGNYEEIIFLIFTLKQAFPTVFDAQ

SEQ ID NO: 3 - protein, 5 aa, Mus musculus
EDLRP

SEQ ID NO: 4 - protein, 6 aa, Mus musculus
MEDLRP

SEQ ID NO: 5 - protein, 227 aa, Artificial Sequence
  Description of Artificial Sequence: Synthetic polypeptide
DKTHTCPPCPAPELLGGPSVFLFPPKPKDTLMISRTPEVTCVVVDVSHEDPEVKFNWYVDGVEVHNAKTKPREEQYNSTYRVVSVLTVLHQDWLNGKEYKCKVSNKALPAPIEKTISKAKGQPREPQVYTLPPSREEMTKNQVSLTCLVKGFYPSDIAVEWESNGQPENNYKTTPPVLDSDGSFFLYSKLTVDKSRWQQGNVFSCSVMHEALHNHYTQKSLSLSPGK

SEQ ID NO: 6 - DNA, 1143 bp, Salmonella typhimurium
acagtggaaaagtccgtggtgttcaaggccgagggcgagcacttcaccgaccagaaaggcaataccatcgtcggctctggcagcggcggcaccaccaagtactttagaatccccgccatgtgcaccaccagcaagggcaccattgtggtgttcgccgacgccagacacaacaccgccagcgatcagagcttcatcgataccgctgccgccagatctaccgatggcggcaagacctggaacaagaagatcgccatctacaacgaccgcgtgaacagcaagctgagcagagtgatggaccctacctgcatcgtggccaacatccagggcagagaaaccatcctggtcatggtcggaaagtggaacaacaacgataagacctggggcgcctacagagacaaggcccctgataccgattgggacctcgtgctgtacaagagcaccgatgacggcgtgaccttcagcaaggtggaaacaaacatccacgacatcgtgaccaagaacggcaccatctctgccatgctcggcggcgttggatctggcctgcaactgaatgatggcaagctggtgttccccgtgcagatggtccgaacaaagaatatcaccaccgtgctgaataccagcttcatctacagcaccgacggcatcacatggtccctgcctagcggctactgtgaaggctttggcagcgagaacaacatcatcgagttcaacgccagcctggtcaacaacatccggaacagcggcctgcggagaagcttcgagacaaaggacttcggaaagacgtggaccgagtttcctccaatggacaagaaggtggacaaccggaaccacggcgtgcagggcagcacaatcacaatccctagcggcaacaaactggtggccgctcactctagcgcccagaacaagaacaacgactacaccagaagcgacatcagcctgtacgcccacaacctgtacagcggcgaagtgaagctgatcgacgacttctaccccaaagtgggcaatgccagcggagccggctacagctgtctgagctaccggaaaaatgtggacaaagaaaccctgtacgtggtgtacgaggccaacggcagcatcgagtttcaggacctgagcagacatctgcccgtgatcaagagctacaac

SEQ ID NO: 7 - protein, 364 aa, Homo sapiens
ENDFGLVQPLVTMEQLLWVSGRQIGSVDTFRIPLITATPRGTLLAFAEARKMSSSDEGAKFIALRRSMDQGSTWSPTAFIVNDGDVPDGLNLGAVVSDVETGVVFLFYSLCAHKAGCQVASTMLVWSKDDGVSWSTPRNLSLDIGTEVFAPGPGSGIQKQREPRKGRLIVCGHGTLERDGVFCLLSDDHGASWRYGSGVSGIPYGQPKQENDFNPDECQPYELPDGSVVINARNQNNYHCHCRIVLRSYDACDTLRPRDVTFDPELVDPVVAAGAVVTSSGIVFFSNPAHPEFRVNLTLRWSFSNGTSWRKETVQLWPGPSGYSSLATLEGSMDGEEQAPQLYVLYEKGRNHYTESISVAKISV

SEQ ID NO: 8 - protein, 428 aa, Homo sapiens
MEEVTTCSFNSPLFRQEDDRGITYRIPALLYIPPTHTFLAFAEKRSTRRDEDALHLVLRRGLRIGQLVQWGPLKPLMEATLPGHRTMNPCPVWEQKSGCVFLFFICVRGHVTERQQIVSGRNAARLCFIYSQDAGCSWSEVRDLTEEVIGSELKHWATFAVGPGHGIQLQSGRLVIPAYTYYIPSWFFCFQLPCKTRPHSLMIYSDDLGVTWHHGRLIRPMVTVECEVAEVTGRAGHPVLYCSARTPNRCRAEALSTDHGEGFQRLALSRQLCEPPHGCQGSVVSFRPLEIPHRCQDSSSKDAPTIQQSSPGSSLRLEEEAGTPSESWLLYSHPTSRKQRVDLGIYLNQTPLEAACWSRPWILHCGPCGYSDLAALEEEGLFGCLFECGTKQECEQIAFRLFTHREILSHLQGDCTSPGRNPSQFKSN

SEQ ID NO: 9 - protein, 461 aa, Homo sapiens
MRPADLPPRPMEESPASSSAPTETEEPGSSAEVMEEVTTCSFNSPLFRQEDDRGITYRIPALLYIPPTHTFLAFAEKRSTRRDEDALHLVLRRGLRIGQLVQWGPLKPLMEATLPGHRTMNPCPVWEQKSGCVFLFFICVRGHVTERQQIVSGRNAARLCFIYSQDAGCSWSEVRDLTEEVIGSELKHWATFAVGPGHGIQLQSGRLVIPAYTYYIPSWFFCFQLPCKTRPHSLMIYSDDLGVTWHHGRLIRPMVTVECEVAEVTGRAGHPVLYCSARTPNRCRAEALSTDHGEGFQRLALSRQLCEPPHGCQGSVVSFRPLEIPHRCQDSSSKDAPTIQQSSPGSSLRLEEEAGTPSESWLLYSHPTSRKQRVDLGIYLNQTPLEAACWSRPWILHCGPCGYSDLAALEEEGLFGCLFECGTKQECEQIAFRLFTHREILSHLQGDCTSPGRNPSQFKSN

SEQ ID NO: 10 - protein, 484 aa, Homo sapiens
MGVPRTPSRTVLFERERTGLTYRVPSLLPVPPGPTLLAFVEQRLSPDDSHAHRLVLRRGTLAGGSVRWGALHVLGTAALAEHRSMNPCPVHDAGTGTVFLFFIAVLGHTPEAVQIATGRNAARLCCVASRDAGLSWGSARDLTEEAIGGAVQDWATFAVGPGHGVQLPSGRLLVPAYTYRVDRRECFGKICRTSPHSFAFYSDDHGRTWRCGGLVPNLRSGECQLAAVDGGQAGSFLYCNARSPLGSRVQALSTDEGTSFLPAERVASLPETAWGCQGSIVGFPAPAPNRPRDDSWSVGPGSPLQPPLLGPGVHEPPEEAAVDPRGGQVPGGPFSRLQPRGDGPRQPGPRPGVSGDVGSWTLALPMPFAAPPQSPTWLLYSHPVGRRARLHMGIRLSQSPLDPRSWTEPWVIYEGPSGYSDLASIGPAPEGGLVFACLYESGARTSYDEISFCTFSLREVLENVPASPKPPNLGDKPRGCCWPS

SEQ ID NO: 11 - protein, 496 aa, Homo sapiens
MMSSAAFPRWLSMGVPRTPSRTVLFERERTGLTYRVPSLLPVPPGPTLLAFVEQRLSPDDSHAHRLVLRRGTLAGGSVRWGALHVLGTAALAEHRSMNPCPVHDAGTGTVFLFFIAVLGHTPEAVQIATGRNAARLCCVASRDAGLSWGSARDLTEEAIGGAVQDWATFAVGPGHGVQLPSGRLLVPAYTYRVDRRECFGKICRTSPHSFAFYSDDHGRTWRCGGLVPNLRSGECQLAAVDGGQAGSFLYCNARSPLGSRVQALSTDEGTSFLPAERVASLPETAWGCQGSIVGFPAPAPNRPRDDSWSVGPGSPLQPPLLGPGVHEPPEEAAVDPRGGQVPGGPFSRLQPRGDGPRQPGPRPGVSGDVGSWTLALPMPFAAPPQSPTWLLYSHPVGRRARLHMGIRLSQSPLDPRSWTEPWVIYEGPSGYSDLASIGPAPEGGLVFACLYESGARTSYDEISFCTFSLREVLENVPASPKPPNLGDKPRGCCWPS

SEQ ID NO: 12 - protein, 5 aa, Homo sapiens
MASLP

SEQ ID NO: 13 - protein, 4 aa, Homo sapiens
ASLP

SEQ ID NO: 14 - protein, 8 aa, Salmonella typhimurium
TVEKSVVF

SEQ ID NO: 15 - protein, 12 aa, Homo sapiens
GDYDAPTHQVQW

SEQ ID NO: 16 - protein, 8 aa, Homo sapiens
SMDQGSTW

SEQ ID NO: 17 - protein, 8 aa, Salmonella typhimurium
STDGGKTW

SEQ ID NO: 18 - protein, 8 aa, Homo sapiens
PRPPAPEA

SEQ ID NO: 19 - protein, 8 aa, Homo sapiens
QTPLEAAC

SEQ ID NO: 20 - protein, 9 aa, Homo sapiens
NPRPPAPEA

SEQ ID NO: 21 - protein, 7 aa, Unknown
  Description of Unknown: Recombinant mutant human sialidase substitution sequence
SQNDGES

SEQ ID NO: 22 - protein, 7 aa, Unknown
  Description of Unknown: Recombinant mutant human sialidase substitution sequence
LSHSLST

SEQ ID NO: 23 - DNA, 1092 bp, Homo sapiens
gagaacgactttggactggtgcagcctctggtcaccatggaacagctgctgtgggtttccggcagacagatcggcagcgtggacaccttcagaatccctctgatcaccgccacacctagaggcaccctgctggcctttgccgaggccagaaagatgagcagctctgacgagggcgccaagtttattgccctgaggcggtctatggaccagggctctacatggtcccctaccgccttcatcgtgaacgatggcgacgtgcccgatggcctgaatctgggagctgtggtgtccgatgtggaaaccggcgtggtgttcctgttctacagcctgtgtgcccacaaggccggttgtcaggtggccagcacaatgctcgtgtggtccaaggacgacggcgtgtcctggtctacccctagaaacctgagcctggacatcggcaccgaagtgtttgctccaggacctggctctggcatccagaagcagagagagcccagaaagggcagactgatcgtgtgtggccacggcacccttgagagagatggcgttttctgcctgctgagcgacgatcatggcgcctcttggagatacggcagcggagtgtctggaatcccttacggccagcctaagcaagagaacgatttcaaccccgacgagtgccagccttacgagctgcctgatggcagcgtcgtgatcaacgcccggaaccagaacaactaccactgccactgccggatcgtgctgagaagctacgacgcctgcgataccctgcggcctagagatgtgaccttcgatcctgagctggtggaccctgttgttgccgctggtgccgtcgtgacatctagcggcatcgtgttcttcagcaaccctgctcaccccgagttcagagtgaatctgaccctgcggtggtccttcagcaatggcacaagctggcggaaagaaaccgtgcagctttggcctggacctagcggctactcttctctggctacactggaaggcagcatggacggcgaagaacaggcccctcagctgtacgtgctgtacgagaagggcagaaaccactacaccgagagcatcagcgtggccaagatcagcgtt

SEQ ID NO: 24 - DNA, 1140 bp, Homo sapiens
atggccagcctgcctgtgctgcagaaagaaagcgtgttccagtctggcgcccacgcctacagaattcccgctctgctgtatctgccaggccagcagtctctgctggctttcgctgaacagcgggccagcaagaaggatgagcacgccgaactgatcgtgctgcggagaggcgattacgacgcccctacacatcaggtgcagtggcaggctcaagaggtggtggctcaggctagactggacggccacagatctatgaacccctgtcctctgtacgatgcccagaccggcacactgtttctgttctttatcgctatccccggccaagtgaccgagcagcagcagctgcagacaagagccaacgtgaccagactgtgtcaagtgacctccaccgaccacggcagaacctggtctagccctagagatctgaccgacgccgccatcggacctgcctatagagagtggtccaccttcgccgttggacctggacactgtctccagctgcacgacagggctagatctctggtggtgcctgcctacgcctatagaaagctgcaccccatccagcggcctattcctagcgccttctgctttctgagccacgatcacggcaggacatgggccagaggacatttcgtggcccaggacacactggaatgccaggtggccgaagtggaaaccggcgagcagagagtcgtgaccctgaacgccagatctcacctgagagccagagtgcaggcccagagcacaaacgacggcctggatttccaagagagccagctggtcaagaaactggtggaacctcctccacagggctgtcagggaagcgtgatcagctttccatctcctagaagcggccctggctctcctgctcagtggctgctgtatacacaccccacacacagctggcagagagccgatctgggcgcctacctgaatcctagacctcctgctcctgaggcttggagcgaacctgttctgctggccaagggcagctgtgcctacagcgatctgcagtctatgggcacaggccctgatggcagccctctgtttggctgtctgtacgaggccaacgactacgaagagatcgtgttcctgatgttcaccctgaagcaggcctttccagccgagtacctgcctcaa

SEQ ID NO: 25 - DNA, 1284 bp, Homo sapiens
atggaggaagtgaccacctgtagcttcaacagccctctgttccggcaagaggacgaccggggcatcacctacagaatccctgctctgctgtacatccctcctacacacacctttctggccttcgccgagaagcggagcaccagacgagatgaagatgccctgcacctggtgctgagaagaggcctgagaatcggacagctggtgcagtggggacctctgaagcctctgatggaagccacactgcccggccacagaaccatgaatccttgtcctgtgtgggagcagaaaagcggctgcgtgttcctgttcttcatctgcgtgcggggccacgtgaccgagagacagcaaatcgtgtccggcagaaacgccgccagactgtgcttcatctacagccaggatgccggctgctcttggagcgaagttcgggatctgaccgaagaagtgatcggcagcgagctgaagcactgggccacatttgctgttggccctggccacggaatccagctgcaatctggcagactggtcatccccgcctacacctactatatccccagctggttcttctgcttccaactgccttgcaagacccggcctcacagcctgatgatctacagcgacgatctgggcgtgacatggcaccacggcagactgatcagacccatggtcaccgtggaatgcgaggtggccgaagtgacaggcagagctggacaccctgtgctgtactgctctgccagaacacccaaccggtgtagagccgaggctctgtctacagatcacggcgagggctttcagagactggccctctctagacagctgtgcgaacctcctcatggctgtcagggcagcgtggtgtccttcagacctctggaaatccctcaccggtgccaggacagcagctctaaggatgcccctaccatccagcagtctagccctggcagcagcctgagactggaagaggaagccggaacacctagcgagagctggctgctgtactctcaccccaccagcagaaagcagagagtggacctgggcatctacctgaatcagacccctctggaagccgcctgttggagcagaccttggattctgcactgtggcccttgcggctactctgatctggccgctctggaagaagagggcctgttcggctgcctgtttgagtgcggcacaaagcaagagtgcgagcagatcgccttccggctgttcacccacagagagatcctgagccatctgcagggcgactgcacaagcccaggcagaaatcccagccagttcaagagcaac

SEQ ID NO: 26 - DNA, 1452 bp, Homo sapiens
atgggcgtgcccagaacacccagcagaaccgtgctgttcgagagagagaggaccggcctgacctacagagtgccttctctgctgcctgtgcctcctggacctacactgctggccttcgtggaacagagactgagccccgatgattctcacgcccacagactggtgctgagaagaggaacactggctggcggctctgttagatggggagcactgcatgtgctgggcacagctgctcttgccgagcacagatccatgaatccctgtcctgtgcacgacgccggaaccggcacagtgtttctgttctttatcgccgtgctgggccacacacctgaggccgttcaaattgccaccggcagaaatgccgccagactgtgttgtgtggcctccagagatgccggcctgtcttggggatctgccagagatctgaccgaggaagccattggcggagccgttcaggattgggccacatttgctgttggacctggacacggcgtgcagctgccaagtggtagactgctggtgcctgcctacacatacagagtggatcggagagagtgcttcggaaagatctgccggacaagccctcacagcttcgccttctactccgacgatcacggccggacttggagatgtggtggcctggtgcctaatctgagaagcggcgaatgtcaactggccgccgttgatggtggacaggctggcagcttcctgtactgcaacgccagatctcctctgggctctagagtgcaggccctgtctaccgatgagggcaccagttttctgcccgccgaaagagttgcctctctgcctgaaacagcctggggctgtcagggctctatcgtgggatttcctgctcctgctccaaacagaccccgggacgattcttggagtgtcggccctggatctccactgcagcctccattgcttggaccaggcgttcacgagccacctgaagaggctgccgttgatcctagaggcggacaagttcctggcggcccttttagcagactgcagccaagaggcgacggccctagacaacctggaccaagacctggcgtcagcggagatgttggctcttggacactggccctgcctatgccttttgccgctcctcctcagtctcctacctggctgctgtactctcaccctgttggcagacgggccagactgcacatgggcatcagactgtctcagagccctctggaccccagaagctggacagagccttgggtcatctatgagggccctagcggctacagcgatctggcctctattggcccagctcctgaaggcggactggtgttcgcttgtctgtatgagagcggcgccagaaccagctacgacgagatcagcttctgcaccttcagcctgcgcgaggtgctggaaaatgtgcccgcctctcctaagcctcctaacctgggcgataagcctagaggctgttgctggccatct

SEQ ID NO: 27 - protein, 47 aa, Homo sapiens
MTGERPSTALPDRRWGPRILGFWGGCRVWVFAAIFLLLSLAASWSKA

SEQ ID NO: 28 - protein, 22 aa, Unknown
  Description of Unknown: N-terminal signal sequence
MDMRVPAQLLGLLLLWLPGARC

SEQ ID NO: 29 - protein, 4 aa, Unknown
  Description of Unknown: C-terminal lysosomal signal motif
YGTL

SEQ ID NO: 30 - protein, 382 aa, Salmonella typhimurium
MTVEKSVVFKAEGEHFTDQKGNTIVGSGSGGTTKYFRIPAMCTTSKGTIVVFADARHNTASDQSFIDTAAARSTDGGKTWNKKIAIYNDRVNSKLSRVMDPTCIVANIQGRETILVMVGKWNNNDKTWGAYRDKAPDTDWDLVLYKSTDDGVTFSKVETNIHDIVTKNGTISAMLGGVGSGLQLNDGKLVFPVQMVRTKNITTVLNTSFIYSTDGITWSLPSGYCEGFGSENNIIEFNASLVNNIRNSGLRRSFETKDFGKTWTEFPPMDKKVDNRNHGVQGSTITIPSGNKLVAAHSSAQNKNNDYTRSDISLYAHNLYSGEVKLIDDFYPKVGNASGAGYSCLSYRKNVDKETLYVVYEANGSIEFQDLSRHLPVIKSYN

SEQ ID NO: 31 - protein, 232 aa, Artificial Sequence
  Description of Artificial Sequence: Synthetic polypeptide
EPKSCDKTHTCPPCPAPELLGGPSVFLFPPKPKDTLMISRTPEVTCVVVDVSHEDPEVKFNWYVDGVEVHNAKTKPREEQYNSTYRVVSVLTVLHQDWLNGKEYKCKVSNKALPAPIEKTISKAKGQPREPQVYTLPPSREEMTKNQVSLTCLVKGFYPSDIAVEWESNGQPENNYKTTPPVLDSDGSFFLYSKLTVDKSRWQQGNVFSCSVMHEALHNHYTQKSLSLSPGK

SEQ ID NO: 32 - protein, 227 aa, Artificial Sequence
  Description of Artificial Sequence: Synthetic polypeptide
DKTHTCPPCPAPELLGGPSVFLFPPKPKDTLMISRTPEVTCVVVDVSHEDPEVKFNWYVDGVEVHNAKTKPREEQYNSTYRVVSVLTVLHQDWLNGKEYKCKVSNKALPAPIEKTISKAKGQPREPQVYTLPPSREEMTKNQVSLTCLVKGFYPSDIAVEWESNGQPENNYKTTPPVLDSDGSFFLTSKLTVDKSRWQQGNVFSCSVMHEALHNHYTQKSLSLSPGK

SEQ ID NO: 33 - protein, 232 aa, Artificial Sequence
  Description of Artificial Sequence: Synthetic polypeptide
EPKSCDKTHTCPPCPAPELLGGPSVFLFPPKPKDTLMISRTPEVTCVVVDVSHEDPEVKFNWYVDGVEVHNAKTKPREEQYNSTYRVVSVLTVLHQDWLNGKEYKCKVSNKALPAPIEKTISKAKGQPREPQVYTLPPSREEMTKNQVSLYCLVKGFYPSDIAVEWESNGQPENNYKTTPPVLDSDGSFFLYSKLTVDKSRWQQGNVFSCSVMHEALHNHYTQKSLSLSPGK

SEQ ID NO: 34 - DNA, 1383 bp, Homo sapiens
atgagacctgcggacctgcccccgcgccccatggaagaatccccggcgtccagctctgccccgacagagacggaggagccggggtccagtgcagaggtcatggaagaagtgacaacatgctccttcaacagccctctgttccggcaggaagatgacagagggattacctaccggatcccagccctgctctacataccccccacccacaccttcctggcctttgcagagaagcgttctacgaggagagatgaggatgctctccacctggtgctgaggcgagggttgaggattgggcagttggtacagtgggggcccctgaagccactgatggaagccacactaccggggcatcggaccatgaacccctgtcctgtatgggagcagaagagtggttgtgtgttcctgttcttcatctgtgtgcggggccatgtcacagagcgtcaacagattgtgtcaggcaggaatgctgcccgcctttgcttcatctacagtcaggatgctggatgttcatggagtgaggtgagggacttgactgaggaggtcattggctcagagctgaagcactgggccacatttgctgtgggcccaggtcatggcatccagctgcagtcagggagactggtcatccctgcgtatacctactacatcccttcctggttcttttgcttccagctaccatgtaaaaccaggcctcattctctgatgatctacagtgatgacctaggggtcacatggcaccatggtagactcattaggcccatggttacagtagaatgtgaagtggcagaggtgactgggagggctggccaccctgtgctatattgcagtgcccggacaccaaacaggtgccgggcagaggcgctcagcactgaccatggtgaaggctttcagagactggccctgagtcgacagctctgtgagcccccacatggttgccaagggagtgtggtaagtttccggcccctggagatcccacataggtgccaggactctagcagcaaagatgcacccaccattcagcagagctctccaggcagttcactgaggctggaggaggaagctggaacaccgtcagaatcatggctcttgtactcacacccaaccagtaggaaacagagggttgacctaggtatctatctcaaccagacccccttggaggctgcctgctggtcccgcccctggatcttgcactgtgggccctgtggctactctgatctggctgctctggaggaggagggcttgtttgggtgtttgtttgaatgtgggaccaagcaagagtgtgagcagattgccttccgcctgtttacacaccgggagatcctgagtcacctgcagggggactgcaccagccctggtaggaacccaagccaattcaaaagcaat

SEQ ID NO: 35 - DNA, 1488 bp, Homo sapiens
atgatgagctctgcagccttcccaaggtggctgagcatgggggtccctcgtaccccttcacggacagtgctcttcgagcgggagaggacgggcctgacctaccgcgtgccctcgctgctccccgtgccccccgggcccaccctgctggcctttgtggagcagcggctcagccctgacgactcccacgcccaccgcctggtgctgaggaggggcacgctggccgggggctccgtgcggtggggtgccctgcacgtgctggggacagcagccctggcggagcaccggtccatgaacccctgccctgtgcacgatgctggcacgggcaccgtcttcctcttcttcatcgcggtgctgggccacacgcctgaggccgtgcagatcgccacgggaaggaacgccgcgcgcctctgctgtgtggccagccgtgacgccggcctctcgtggggcagcgcccgggacctcaccgaggaggccatcggtggtgccgtgcaggactgggccacattcgctgtgggtcccggccacggtgtgcagctgccctcaggccgcctgctggtacccgcctacacctaccgcgtggaccgccgagagtgttttggcaagatctgccggaccagccctcactccttcgccttctacagcgatgaccacggccgcacctggcgctgtggaggcctcgtgcccaacctgcgctcaggcgagtgccagctggcagcggtggacggtgggcaggccggcagcttcctctactgcaatgcccggagcccactgggcagccgtgtgcaggcgctcagcactgacgagggcacctccttcctgcccgcagagcgcgtggcttccctgcccgagactgcctggggctgccagggcagcatcgtgggcttcccagcccccgcccccaacaggccacgggatgacagttggtcagtgggccccgggagtcccctccagcctccactcctcggtcctggagtccacgaacccccagaggaggctgctgtagacccccgtggaggccaggtgcctggtgggcccttcagccgtctgcagcctcggggggatggccccaggcagcctggccccaggcctggggtcagtggggatgtggggtcctggaccctggcactccccatgccctttgctgccccgccccagagccccacgtggctgctgtactcccacccagtggggcgcagggctcggctacacatgggtatccgcctgagccagtccccgctggacccgcgcagctggacagagccctgggtgatctacgagggccccagcggctactccgacctggcgtccatcgggccggcccctgaggggggcctggtttttgcctgcctgtacgagagcggggccaggacctcctatgatgagatttccttttgtacattctccctgcgtgaggtcctggagaacgtgcccgccagccccaaaccgcccaaccttggggacaagcctcgggggtgctgctggccctcc

SEQ ID NO: 36 - protein, 781 aa, Vibrio cholerae
MRFKNVKKTALMLAMFGMATSSNAALFDYNATGDTEFDSPAKQGWMQDNTNNGSGVLTNADGMPAWLVQGIGGRAQWTYSLSTNQHAQASSFGWRMTTEMKVLSGGMITNYYANGTQRVLPIISLDSSGNLVVEFEGQTGRTVLATGTAATEYHKFELVFLPGSNPSASFYFDGKLIRDNIQPTASKQNMIVWGNGSSNTDGVAAYRDIKFEIQGDVIFRGPDRIPSIVASSVTPGVVTAFAEKRVGGGDPGALSNTNDIITRTSRDGGITWDTELNLTEQINVSDEFDFSDPRPIYDPSSNTVLVSYARWPTDAAQNGDRIKPWMPNGIFYSVYDVASGNWQAPIDVTDQVKERSFQIAGWGGSELYRRNTSLNSQQDWQSNAKIRIVDGAANQIQVADGSRKYVVTLSIDESGGLVANLNGVSAPIILQSEHAKVHSFHDYELQYSALNHTTTLFVDGQQITTWAGEVSQENNIQFGNADAQIDGRLHVQKIVLTQQGHNLVEFDAFYLAQQTPEVEKDLEKLGWTKIKTGNTMSLYGNASVNPGPGHGITLTRQQNISGSQNGRLIYPAIVLDRFFLNVMSIYSDDGGSNWQTGSTLPIPFRWKSSSILETLEPSEADMVELQNGDLLLTARLDFNQIVNGVNYSPRQQFLSKDGGITWSLLEANNANVFSNISTGTVDASITRFEQSDGSHFLLFTNPQGNPAGTNGRQNLGLWFSFDEGVTWKGPIQLVNGASAYSDIYQLDSENAIVIVETDNSNMRILRMPITLLKQKLTLSQN

SEQ ID NO: 37 - DNA, 2424 bp, Vibrio cholerae
ttgtcaatcaagatgacttcacaacgaagaagagcatcgattcacaaggaaacagattctaatataaagggagtagatatgcgtttcaaaaacgtaaagaaaaccgctttaatgcttgcaatgttcggtatggcgacaagctcaaacgccgcactttttgactataacgcaacgggtgacactgagtttgacagtccagccaaacagggatggatgcaagacaacacgaataatggcagcggcgttttaaccaatgcagatggaatgcccgcttggttggtgcaaggtattggagggagagctcaatggacatattctctctctactaatcaacatgcccaagcatcaagtttcggttggcgaatgacgacagaaatgaaagtgctcagtggtggaatgatcacaaactactacgccaacggcactcagcgtgtcttacccatcatttcattagatagcagtggtaacttagttgttgagtttgaagggcaaactggacgcaccgttttggcaaccggcacagcagcaacggaatatcataaatttgaattggtattccttcctggaagtaacccatccgctagcttttacttcgatggcaaactcattcgtgacaacatccagccgactgcatcaaaacaaaatatgatcgtatgggggaatggctcatcaaatacggatggtgtcgccgcttatcgtgatattaagtttgaaattcaaggcgacgtcatcttcagaggcccagaccgtataccgtccattgtagcaagtagcgtaacaccaggggtggtaaccgcatttgcagagaaacgtgtggggggaggagatcccggtgctctgagtaataccaatgacataatcactcgtacctcacgagatggcggtataacttgggataccgagctcaacctcactgagcaaatcaatgtcagtgatgagtttgatttctccgatcctcggcctatctatgatccttcctccaatacggttcttgtctcttatgctcgatggccgaccgatgccgctcaaaacggagatcgaataaaaccatggatgccaaacggtattttttacagcgtctatgatgttgcatcagggaactggcaagcgcctatcgatgttaccgatcaggtgaaagaacgcagtttccaaatcgctggttggggtggttcagagctgtatcgccgaaataccagcctaaatagccagcaagactggcaatcaaacgctaagatccgaattgttgatggtgcagcgaaccagatacaagttgccgatggtagccgaaaatatgttgtcacactgagtattgatgaatcaggtggtctagtcgctaatctaaacggtgttagtgctccgattatcctgcaatctgaacacgcaaaggtacactctttccatgactacgaacttcaatattcggcgttaaaccacaccacaacgttattcgtggatggtcagcaaatcacaacttgggctggcgaagtatcgcaggagaacaacattcagtttggtaatgcggatgcccaaattgacggcagactgcatgtgcaaaaaattgttctcacacagcaaggccataacctcgtggagtttgatgctttctatttagcacagcaaacccctgaagtagagaaagaccttgaaaagcttggttggacaaaaattaaaacgggcaacaccatgagtttgtatggaaatgccagtgtcaacccaggaccgggtcatggcatcacccttactcgacaacaaaatatcagtggcagccaaaacggccgcttgatctacccagcgattgtgcttgatcgtttcttcttgaacgtcatgtctatttacagtgatgatggcggttcaaactggcaaaccggttcaacactccctatcccctttcgctggaagagttcgagtatcctagaaactctcgaacctagtgaagctgatatggttgaactccaaaacggtgatctactccttactgcacgccttgattttaaccaaatcgttaatggtgtgaactatagcccacgccagcaatttttgagtaaagatggtggaatcacgtggagcctacttgaggctaacaacgctaacgtctttagcaatatcagtactggtaccgttgatgcttctattactcggttcgagcaaagtgacggtagccatttcttactctttactaacccacaaggaaaccctgcggggacaaatggcaggcaaaatctaggcttatggtttagcttcgatgaaggggtgacatggaaaggaccaattcaacttgttaatggtgcatcggcatattctgatatttatcaattggattcggaaaatgcgattgtcattgttgaaacggataattcaaatatgcgaattcttcgtatgcctatcacattgctaaaacagaagctgaccttatcgcaaaactaa

SEQ ID NO: 38 - protein, 409 aa, Mus musculus
MVGADPTRPRGPLSYWAGRRGQGLAAIFLLLVSAAESEARAEDDFSLVQPLVTMEQLLWVSGKQIGSVDTFRIPLITATPRGTLLAFAEARKKSASDEGAKFIAMRRSTDQGSTWSSTAFIVDDGEASDGLNLGAVVNDVDTGIVFLIYTLCAHKVNCQVASTMLVWSKDDGISWSPPRNLSVDIGTEMFAPGPGSGIQKQREPGKGRLIVCGHGTLERDGVFCLLSDDHGASWHYGTGVSGIPFGQPKHDHDFNPDECQPYELPDGSVIINARNQNNYHCRCRIVLRSYDACDTLRPRDVTFDPELVDPVVAAGALATSSGIVFFSNPAHPEFRVNLTLRWSFSNGTSWLKERVQVWPGPSGYSSLTALENSTDGKKQPPQLFVLYEKGLNRYTESISMVKISVYGTL

SEQ ID NO: 39 - protein, 393 aa, Mus musculus
MTVQPSPWFSDLRPMATCPVLQKETLFRTGVHAYRIPALLYLKKQKTLLAFAEKRASKTDEHAELIVLRRGSYNEATNRVKWQPEEVVTQAQLEGHRSMNPCPLYDKQTKTLFLFFIAVPGRVSEHHQLHTKVNVTRLCCVSSTDHGRTWSPIQDLTETTIGSTHQEWATFAVGPGHCLQLRNPAGSLLVPAYAYRKLHPAQKPTPFAFCFISLDHGHTWKLGNFVAENSLECQVAEVGTGAQRMVYLNARSFLGARVQAQSPNDGLDFQDNRVVSKLVEPPHGCHGSVVAFHNPISKPHALDTWLLYTHPTDSRNRTNLGVYLNQMPLDPTAWSEPTLLAMGICAYSDLQNMGQGPDGSPQFGCLYESGNYEEIIFLIFTLKQAFPTVFDAQ

SEQ ID NO: 40 - protein, 418 aa, Mus musculus
MEEVPPYSLSSTLFQQEEQSGVTYRIPALLYLPPTHTFLAFAEKRTSVRDEDAACLVLRRGLMKGRSVQWGPQRLLMEATLPGHRTMNPCPVWEKNTGRVYLFFICVRGHVTERCQIVWGKNAARLCFLCSEDAGCSWGEVKDLTEEVIGSEVKRWATFAVGPGHGIQLHSGRLIIPAYAYYVSRWFLCFACSVKPHSLMIYSDDFGVTWHHGKFIEPQVTGECQVAEVAGTAGNPVLYCSARTPSRFRAEAFSTDSGGCFQKPTLNPQLHEPRTGCQGSVVSFRPLKMPNTYQDSIGKGAPATQKCPLLDSPLEVEKGAETPSATWLLYSHPTSKRKRINLGIYYNRNPLEVNCWSRPWILNRGPSGYSDLAVVEEQDLVACLFECGEKNEYERIDFCLFSDHEVLSCEDCTSPSSD

SEQ ID NO: 41 - protein, 501 aa, Mus musculus
METAGAPFCFHVDSLVPCSYWKVMGPTRVPRRTVLFQRERTGLTYRVPALLCVPPRPTLLAFAEQRLSPDDSHAHRLVLRRGTLTRGSVRWGTLSVLETAVLEEHRSMNPCPVLDEHSGTIFLFFIAVLGHTPEAVQIATGKNAARLCCVTSCDAGLTWGSVRDLTEEAIGAALQDWATFAVGPGHGVQLRSGRLLVPAYTYHVDRRECFGKICWTSPHSLAFYSDDHGISWHCGGLVPNLRSGECQLAAVDGDFLYCNARSPLGNRVQALSADEGTSFLPGELVPTLAETARGCQGSIVGFLAPPSIEPQDDRWTGSPRNTPHSPCFNLRVQESSGEGARGLLERWMPRLPLCYPQSRSPENHGLEPGSDGDKTSWTPECPMSSDSMLQSPTWLLYSHPAGRRARLHMGIYLSRSPLDPHSWTEPWVIYEGPSGYSDLAFLGPMPGASLVFACLFESGTRTSYEDISFCLFSLADVLENVPTGLEMLSLRDKAQGHCWPS

SEQ ID NO: 42 - DNA, 3850 bp, Mus musculus
gggtcacatgctgatggactaattggagtcgcggcagcgcgggctgcggcccccaaggggaggggtcggagtgacgtgcgcgcttttaaagggccgaggtcagctgacggcttgccaccggtgaccagttcctggacagggatcgccgggagctatggtgggggcagacccgaccagaccccggggaccgctgagctattgggcgggccgtcggggtcaggggctcgcagcgatcttcctgctcctggtgtccgcggcggaatccgaggccagggcagaggatgacttcagcctggtgcagccgctggtgaccatggagcagctgctgtgggtgagcgggaagcagatcggctctgtagacactttccgcatcccgctcatcacagccacccctcggggcacgctcctggccttcgctgaggccaggaaaaaatctgcatccgatgagggggccaagttcatcgccatgaggaggtccacggaccagggtagcacgtggtcctctacagccttcatcgtagacgatggggaggcctccgatggcctgaacctgggcgctgtggtgaacgatgtagacacagggatagtgttccttatctataccctctgtgctcacaaggtcaactgccaggtggcctctaccatgttggtttggagtaaggacgacggcatttcctggagcccaccccggaatctctctgtggatattggcacagagatgtttgcccctggacctggctcaggcattcagaaacagcgggagcctgggaagggccggctcattgtgtgtggacacgggacgctggagcgagatggggtcttctgtctcctcagtgatgaccacggtgcctcctggcactacggcactggagtgagcggcattccctttggccagcccaaacacgatcacgatttcaaccccgacgagtgccagccctacgagcttccagatggctcggtcatcatcaacgcccggaaccagaataactaccattgccgctgcaggatcgtcctccgcagctatgacgcctgtgacaccctcaggccccgggatgtgaccttcgaccctgagctcgtggaccctgtggtagctgcaggagcactagccaccagctccggcattgtcttcttctccaatccagcccaccctgagttccgagtgaacctgaccctgcgctggagtttcagcaatggtacatcctggcagaaggagagggtccaggtgtggccgggacccagcggctactcgtccctgacagccctggaaaacagcacggatggaaagaagcagcccccgcagctgttcgttctgtacgagaaaggcctgaaccggtacaccgagagcatctccatggtcaaaatcagcgtctacggcacgctctgagccccgtgcccaaaggacaccaagtcctggtcgctgacttcacagctctctggaccatctgcagagggtgcctgaaacacagctcttcctctgaactctgaccttttgcaacttctcatcaacagggaagtctcttcgttatgacttaacacccagcttcctctcggggcaggaagtccctccgtcaccaagagcacttttttccagtatgctggggatggcccctgtccattctcttccaggacaacggagctgtgcctttctgggacaggatgggggaggggctccccctggagagatgaacagatacgaactcagggaactgagaaggcccggtgtcctagggtacaaaggcaggtactagatgtgattgctgaaagtccccagggcagagtgtcctttcagagcaaggataagcacacctacgtgtgcacctttgattatttatgaatcgaaatatttgtaacttaaaatttttgatgcagaaaaagcgtttgtggagtctgtggttctgtctgctcacgccttcccaattgcctcctggagagacaggaaggcagctggaagaggagccgatgtacttactgggaagcagaaacccctagattccatcctggctgctgctgtttgcaagtgtcaaagatgggggggcgtgtttatattttatatttctaagatggggtggcataggaaatagggaacagatgtgtaaaaccagatgggaaggacagtctgtgagaaaggagcaagcagttgctgcaggtgtgggagagcaaagcccttctccacgtggaaagagcccagatggacgctaagcatgttgggcacctgtaaccccgcactcgctggactgacggtgtagctcagtggtggagctagtacttggaacgcctaagactctgggttcagtccttgggggggggggtatgtgtttattgagaggaaggtgtacgtactgtaggtcagaggacagcttactggagttgtctctctccttcacgctgtgagtcctgtggaatgacctcaggtgtcagagttgggggcaggtgcctttgccagctgagccatcttgctgtctctgctttaatttaaaaaaaaaaaaaaaaaagaatattaaggtctgagggattcgggctgcgttcatttcaattagagggtcatatttcttttgacatttcttctctaagaaatgttaagatcatttgttctgtgtgatagaggtatagctccattgtatgtcagcagtgagggatcctgtgcattttatccagagtttgtacggtgttctaggggctgctagtgcagcccagtgctaaacacttcagcatgcacaaggcctcaatcagtgcatgcatgtgcacacacacacagacacacacgtacacactgacacaggtacacaaatacacactggcccacatgtacacatcgactcacaggtacacagacccactttgacacacatatacacagacacaaacgcactggcacacacatatacacaggcacacatggatagatggacacacgtgtacacatacacacacacacagaaatacaaatgttcaggttttctaaaaaaaaaaaaattagagacgtgttgacttcatttttagcaaaaatcctgtcatgtatcttaaagtggattgaacccactatgtagcccaggctggcctccaaatgggcatccttctgcctcagtctcccgagggctaggataacaggagtatgccatcacacctggctaatagaaattttcaaaattgtttgtttgaaggtgactcttactatattgcctaactgatctccagttcgtgaaatcctcctgcctcagaaccaggactgtcaatataacccaccaagacaggccaacattcacaattgattgttagtttgtggtctgaatcaaggtcttatactgtagcccaggctagcccggaatacacgatatctccagtgcttcagatcctcagttctaactaagcatggccacatccatgtttaactgcaaatttgatgttaccatggtttggtttggtttggtttggtttggtttggtttggtttggttttttggccattttttttttctcatgctgaggccttgtgctctcaagttggggagacagcatggagggtagctgcaactgtaaccccagttccaggggacctgacaccctctggcctccacaagtattaggcacatctgtggtgcacagacatacaatcaggcaaaatattcatacacataaaataaaataatttaaaacaaaagcaaaaatcaggacctaagaaaaaaatctattcctgattcttttatgttttgtttgtattttatcaagacagggttgtttctctgtatagccctggctgtcttggaattcactctgtagaccaggctggcctcaaactcagaaatcctcctgcctttgccttccaagtgctggaattaaaggcatgcgccacc

SEQ ID NO: 43 - DNA, 1722 bp, Mus musculus
gacatgacccaaacggcccctggctgcaaggtaatatcggaagttgactaagaatggacgccccaccactgactgacccgccccctgagtctgagattggacttgtctctggatacagtcatactttgaggtactacaagttagaaactgttaggttactcagttcagtccatgacagtccaaccttctccatggttttccgatctcaggcccatggcgacctgccctgtcctgcagaaggagacactgttccgcacaggcgtccatgcttacagaatccctgctctgctctacctgaagaagcagaagaccctgctggcctttgcggaaaagcgagccagcaagacggatgagcacgcagagttgattgtcctgagaagaggaagctacaacgaagccaccaaccgtgtcaagtggcagcctgaggaagtggtgacccaagcccagctggaaggccaccgctccatgaatccatgtcccttgtatgacaagcaaacaaagaccctcttccttttcttcatcgctgtccctgggcgtgtatcagaacatcatcagctccacactaaggttaatgtcacacggctgtgctgtgtcagcagcactgaccatgggaggacctggagccccatccaggacctcacagagaccaccattggcagcactcatcaggaatgggccacatttgctgtgggtcctgggcattgtctgcagctgcggaacccagctgggagcctgctggtacctgcttatgcctaccggaaactgcaccctgctcagaagcctaccccctttgccttctgcttcatcagccttgaccatgggcacacatggaaactaggcaactttgtggctgaaaactcactggagtgccaggtggctgaggttggcactggagctcagaggatggtatatctcaatgctaggagcttcctgggagccagggtccaggcacaaagtcctaatgatggtctggatttccaggacaaccgggtagtgagtaagcttgtagagcccccccacgggtgtcatggaagtgtggttgccttccacaaccccatctctaagccacatgccttagacacatggcttctttatacacaccctacagactccaggaatagaaccaacctgggtgtgtacctaaaccagatgccactagatcccacagcctggtcagagcccaccctgctggccatgggcatctgtgcctactcagacttacagaacatggggcaaggccctgatggctccccacagtttgggtgtctgtatgaatcaggtaactatgaagagatcattttcctcatattcaccctgaagcaagctttccccactgtatttgatgcccagtgatctcagtgcacgtggcccaaagggcttccttgtgcttcaaaacacccatctctctttgcttccagcatcctctggactcttgagtccagctcttgggtaacttcctcaggaggatgcagagaatttggtctcttgactctctgcaggccttattgtttcagcctctggttctcttttcagcccagaaatcaaaggagcctggctttcctcagcctgttggcagggcaggtggggacagtatatatagaggctgccattctgcatgtcggttgtcactatgctagtttaacctgcctgtttccccatgcctagtgtttgaatgagtattaataaaatatccaacccagcccatttcttcctggaaaaaaa

SEQ ID NO: 44 - DNA, 3340 bp, Mus musculus
actgcgcggtgaaggggcgtggcctggccggggaggttgacacccagacgctgctctcagtcctctggcgcctgctccccagcgcattccttctgctcctgggatatttgtctcattactgccagttcttgcgcagcggtcactgggttcgtttcagcgtctgtggtttctgtcgctgttatccagtctccatcgccccagctcagcttcaggccttcttccgagactccacgggagagcccagagagcctccggagccgaagccatggaggaagtcccaccctactccctcagcagcaccctgttccagcaggaagaacagagtggggtgacctaccggatcccagccctgctgtaccttcctcccacccacaccttcctggcctttgcagagaagcggacctcagtcagagatgaggatgctgcctgcctggtgctcagacgagggctgatgaaggggcgctctgtacagtggggcccccaacggctactgatggaggccacattacctgggcatcgcaccatgaacccctgccctgtgtgggagaaaaatactggccgtgtgtacctgtttttcatctgtgtgcggggccatgttactgagaggtgccagattgtgtggggcaaaaatgccgcccgtctctgcttcctttgcagtgaagatgccggctgctcttggggtgaagtgaaagacttgaccgaggaggtcattggctcagaggtgaagcgctgggccacatttgctgtgggcccaggtcatggcatccagctacactcgggaaggctgatcatccccgcctatgcctactatgtctcacgttggtttctctgctttgcgtgttcagtcaagccccattccctgatgatctacagtgatgactttggagtcacatggcaccatggcaagttcattgagccccaggtgacaggggagtgccaagtggccgaagtggctgggacggctggtaaccctgtgctcactgcagtgcccgaacaccaagccgatttcgagcagaggcttttagtactgatagtggtggctgctttcagaagccaaccctgaacccacaactccatgagcctcgaaccggctgccaaggtagtgtagtgagcttccggcctttgaagatgccaaatacctatcaagactcaattggcaaaggtgctcccgctactcagaagtgccctctgctggacagtcctctggaggtggagaaaggagctgaaacaccatcagcaacatggctcttgtactcacatccaactagcaagaggaagaggattaacctaggcatctactacaaccggaaccccttggaggtgaactgctggtcccgcccgtggatcttgaaccgtgggcccagtggctactctgatctggctgttgtggaagaacaggacttggtggcgtgtttgtttgagtgtggggagaagaatgagtatgagcggattgacttctgtctgttttcagaccatgaggtcctgagctgtgaagactgtaccagccctagtagcgactaaagccaaatcaagacggatgagtgaggcccagcttcccacagaaaggaatggcagctacagccagggtaacagaggtctctgatgtctagagaaaactctaaaaactaataatctgctccttgaattttttcacttttcccttcaatgagcatggtgaaaattgtgccatatcttacataacgaggctcttgaactgggagtttgaatctcttctcttcccattaaaaggagaggccatgtgctcgcttcgcgttcgacaaagcctggattctgatcttgagtggaagccacaggcttgtcttttccaatggttcactgctcacctgagtattaggtgatgtgtaggtgccttggccagaagaaagatctgtgttgttgtatttttttaaatttatttatttactatatgtaagtacactgcagctgtcttcagacacaccagaagagggcgtcagatctcattagagatggttgtgagccaccatgtggttgctgggatttgaactcaggaccttcagaagagcagtcagtgctcttaactactgagccatctctcaagccccgcattgctgtatttttaataagaaaaatgcccttatccttccaataatgcctggagctgtacaaattctctgtcttagaagacttgagaaagcagaactgtaaggtcagatgctttctccagccttgatgctgtgttccaccttcccttcctcatccagaaaacagttactagggagaaaatgagaaacccatgccagctgcccttgatgatggttgataacggtgcttattgcttttgatgtcattacctctgttagagatgaatcagagtcagaggtccttagctgcatccacccatttccagggggacattctaacactgctgaacagtcagctaaaatgagagctgtgtgtcctagcctgattccaggttagtcatgatgcttcctggagctgggcttttatctaatcccaggagccatctaggggaggctcagagctagcaggtgatcttcctgagatggtttcaccgtgacaggtgaaccatgagcccttccaagcaaggccaaaggacaacattataggaaagatttctagtattaatatgccttttctctgtgtgtgtactgtcttgtagtgatgctatatagacaaatagatgatttcttattttttgtttgtttgtttgtttttttgtttttctgtagccctagctgtcctggaactcactttgtaaaccaggctggcctcgatctcagaaatccgcctgcctctgcctcccgagtgctgggattaaaggtgtgcaccaccacaccttaatgatgatcctataagtattcctaaaattatactagtaattattaactcctttataataggactgctattaaagccctcgctgatatgaaaactacagtgagaactctgccagtcttcacatgtcataattacttctgagatagaaagcaggcatttacaacttagaacacatttcttagagctgtaaaacaattaactagaggtcataaaagggaatgaaagatttattgtaggtgctaggacagaacataaaatattgactgggcttatctatatgaaacttcattgttaacttttacacaagaattatggtttttaactttcagtgaacctgcggagctagtgacagaagagaaatgtctagttagataactactcttaatggaaattcacataaacatctgttgccatcttctttttgaatttatgtttaaacttgtgaatgtttgaattagacactacgcgagcacatagaaaataaagaactaagcgtgaa

SEQ ID NO: 45 - DNA, 4608 bp, Mus musculus
ggacagtgtgcatcacggagcttgtggcccagactgtgcctggcagacccagaggacctaaggcttggctctagtggtggtcagcacagccctcggtggtctgcggagcctgatattgctttacgtaagggctgttctgctgtgcatctcctgtgtctgaagctattcgccatggagactgctggagctcccttctgcttccatgtggactccctggtaccttgctcctactggaaggttatggggcccacgcgtgttcccaggagaacggtgctcttccagagggaaaggacgggcctgacctaccgtgtgcctgcgttactctgtgtgcctcccaggcctactctgctggccttcgcggaacagcgacttagccctgatgactcccatgcccaccgcctggtgctacggaggggcacgctgaccaggggctcagtgcggtggggcactctgagtgtactggagactgcagtactggaggagcacaggtctatgaacccttgcccggtgctggatgagcactctggtaccatcttcctcttcttcattgccgtgctgggccacacaccggaggccgtgcaaatcgccactggcaagaacgctgctcgcctctgctgtgtgaccagctgtgacgctggcctcacctggggcagtgttcgagatctcactgaggaagccattggtgctgcattgcaggactgggccacctttgctgtgggtccgggccatggagttcagctgcgctcgggtcgcctgcttgttcctgcttacacctatcatgtggaccgacgggaatgttttggcaagatctgctggaccagtccccactccttggcattctacagtgatgatcatgggatctcctggcattgtggaggccttgtgcccaacctacgctctggagagtgccaactggctgcggtagatggagactttctctactgtaatgctcgaagccctctgggtaaccgtgtgcaggcactgagtgctgatgaaggcacgtccttcctaccaggggagctggtgcctacattggcagagacggctcgtggttgccagggtagcattgtgggcttcctagctccaccctcaatcgagcctcaggatgaccggtggacagggagtcctaggaacaccccacattccccatgcttcaatctcagagtacaggagtcttcgggggaaggtgccagaggtcttcttgaacgttggatgcccaggttgcctctctgctacccacagtcccggagcccagagaatcatggcctagagcctgggtcagatggagataagacatcctggactccggaatgtcctatgtcctctgattccatgcttcagagccccacatggctactatattcccacccagcagggcgtagagctcggctccacatgggaatctacctgagccgatcccccttggatccccacagctggacagagccctgggtgatctatgagggccccagtggctactctgaccttgcctttcttgggcctatgcctggggcatccctggtttttgcctgtctgtttgagagcgggaccaggacttcctatgaagacatttctttttgcttgttctcactggcggatgtcctggagaatgtgcccactggcttagagatgctaagtctcagggataaggctcaggggcattgctggccctcttgatggcctcaccctctcgtagccgcctggagaggaagggtagactatatagaggaggttaggggtaggtcagcatgatgctaggatggagagagctctgtcccctcgtggatggtggtggtgactcacccggggggccagctgctttctgagtgcaaatgagaaaaataaagagctgcgctgtgacttttctttccacatcaaagcttgggtgtcagtgctttagcttgatgctctgatcaccatgcaaatcttccaccggcgccttgctcagctttcatatcccaagggtgcctgggaggaaggcaacagggacagtggacatcactgcaccactttccacgaccctgtgtgccaacctcagccactttgaaacatgctgatgactgaggtctgttcactttcttaatttcaagcaggagaagcaggttggggagccagcctccccagctagaggggacagaacttgacttgagcaggggggtacctcctaggacctgctccatgtgcctacttctttacccttctctagagagggctcttgtcctgtcagagctgttttctcccttctcttgttttttctttttcaagactgtttctctgtgttagccctggctgtcctggatctcactctgtagatcaggctgaccttgagttcaaagctccatctgcctctacttctcacattactgtgattaaaggcatatactaccactgcctggtgcccttttgtatttcttattaaagtcctaatgtctgattataaaaacagtctgtgtgggctggagtgatggcttactcagtaaagcacttgccatggaatctgggcaatctgagtttcatttttagcatcctgtaaaaatcccaatttgatggtgtacttgtaatgtcagcatggagaggcagagataggtaagttccccaagactctttgaaccgacagcttggcctcactggcacattccaggtctcagtgagagaccctgcctcaaaatacaaagaaagagctgctgaagagtgggtcagagttgacctctgatctccggaagtatatgatacacacccgtgcatgcactcttccttacaaaataaaaagcaaaacaaaaccccaacaggtatatggccattttagaaaaattagaagatttagaaagctatacataaaaaaaaatgacctaaagaaaaatctttactgttctgggcactatccctatcaaaccactgtgttctttggccaagccttggggtggacactgttttgaggtgggtcctgttatctccactaggtagtggagttttgtgtcagactaactgggtcttaaagctgtctttaaggccatcaggagctactgacttgcctgcctcagcagagcatatcctgaaggtcggggttaagtctccttcccgagcgagttgccttccagtgggcccctggactcctaggtcctcagcgctcatcagctgccaaggactctgagggaatgtcctctgactgtggccccgaaaggtaggggagggggatgtgcttaggcttaggacagggtcctgtttcagtctgccttcactgttagtagcactgtgccacatggcacagactgggcgagctttaaaggaaggaggttgatattggttcccacttctggggatcatggttgagcagccttgtctgatgatggttgtcttgatggtagatcgtgaggtagttgatgaaggtatgacatggtgagaaactctgtgtgtgtgtgttattttctctgtgttctacctatacatctatctatgtatatatgtatctatctatctacctggaggctggagagatagcttagtggttaagaacatttgttgttcttgcatagtcctggatttaaattttcagcacccacatggcagctcacaacaacccataaatccagtttcagaggatccaacctctgatataccatgtcagccagagcagacacggctgaaggtggtttgatccccgtatggagaggtgacaattgggaagagagaaagatcaacttaaccatgcaaggaacaggaagttaaatactgaacagggaaggtaaaggcaggaagtagatgtagagggcaaatcaatgaaacccaaacatacccaaattacgctaaacacacactgacatgccaattaaaaggacaaattggctccactggcaaaaccaaaacagacactgaagatccaaacagtcacatgccaactaccgcggagggagacagacacagagaagaccgtgacagacacttggacactcttgagagtggatgtgcaggaagagagctctgccagtggagaagaaagcactcagaagaaagtgacagcagctgtaaatttgtattctgctaatgttatgttccaaagttgaaagcaaaattgtaccaattcataagaacaaacaggctgactctcagttgtgactgaacgtctctcagtaactgacggggcgagcaggccaaaggagagtcggctcagaagggtgcatagccacgccaaatcaaataagcaagtacaaccggcaggctctatttctagcacaaaggggtctgtgcctcattctgtgcttgggtcagagcttgggtctctcatttggatgtaagtggtgtagtggagaagcaggaaataatccggagcgcatattttgattttaacataagtgctgatttgggagggagttttgtcaaattgtgtttttacaatgtttttttttttttaaatgatgcttttttgtaaagtgtacaaatgtgatataagattggttctgctacattcagtttctataaaagtggttctaaaatattgtactgtcaatcatctcatgattattctactgtacacattactgactttgtatgtaataattaatattagaagaaaatataatttatttgaatataaaaaaaaaaaaaaaaaaa

SEQ ID NO: 46 - protein, 380 aa, Artificial Sequence
  Description of Artificial Sequence: Synthetic polypeptide
  MOD_RES (1)..(1): Ala, Arg, Asn, Asp, Gln, Glu, Gly, His, Leu, Lys, Met, Phe, Thr, Val, or not present
  MOD_RES (6)..(6): Phe, Trp, Tyr or Val
  MOD_RES (9)..(9): Lys or Asp
  MOD_RES (62)..(62): Pro, Asn, Asp, His, Glu, Gly, Ser or Thr
  MOD_RES (93)..(93): Ala, Glu, or Lys
  MOD_RES (187)..(187): Arg, Ile, or Lys
  MOD_RES (270)..(270): Gln, Ala, His, Phe, or Pro
  MOD_RES (301)..(301): Ser or Arg
  MOD_RES (302)..(302): Trp or Lys
  MOD_RES (332)..(332): Ala, Cys, Ser, or Val
  MOD_RES (363)..(363): Val or Arg
  MOD_RES (365)..(365): Leu, Gln, His, Ile, Lys, or Ser
  See specification as filed for detailed description of substitutions and preferred embodiments
XASLPXLQXESVFQSGAHAYRIPALLYLPGQQSLLAFAEQRASKKDEHAELIVLRRGDYDAXTHQVQWQAQEVVAQARLDGHRSMNPCPLYDXQTGTLFLFFIAIPGQVTEQQQLQTRANVTRLCQVTSTDHGRTWSSPRDLTDAAIGPAYREWSTFAVGPGHCLQLHDRARSLVVPAYAYRKLHPXQRPIPSAFCFLSHDHGRTWARGHFVAQDTLECQVAEVETGEQRVVTLNARSHLRARVQAQSTNDGLDFQESQLVKKLVEPPPXGCQGSVISFPSPRSGPGSPAQWLLYTHPTHXXQRADLGAYLNPRPPAPEAWSEPVLLAKGSXAYSDLQSMGTGPDGSPLFGCLYEANDYEEIXFXMFTLKQAFPAEYLPQ

SEQ ID NO: 47 - protein, 380 aa, Artificial Sequence
  Description of Artificial Sequence: Synthetic polypeptide
  MOD_RES (1)..(1): Ala, Arg, Asn, Asp, Gln, Glu, Gly, His, Leu, Lys, Met, Phe, Thr, Val, or not present
  MOD_RES (2)..(2): Ala or Lys
  MOD_RES (4)..(4): Asn or Leu
  MOD_RES (5)..(5): Pro or His
  MOD_RES (6)..(6): Phe, Trp, Tyr or Val
  MOD_RES (9)..(9): Lys or Asp
  MOD_RES (44)..(44): Lys, Arg, or Glu
  MOD_RES (45)..(45): Lys, Ala, Arg, or Glu
  MOD_RES (54)..(54): Leu or Met
  MOD_RES (62)..(62): Pro, Asn, Asp, His, Glu, Gly, Ser or Thr
  MOD_RES (69)..(69): Gln or His
  MOD_RES (78)..(78): Arg or Lys
  MOD_RES (93)..(93): Ala, Glu or Lys
  MOD_RES (107)..(107): Gly or Asp
  MOD_RES (108)..(108): Gln or His
  MOD_RES (112)..(112): Gln, Arg, or Lys
  MOD_RES (125)..(125): Ala, Cys, Ile, Ser, Val, or Leu
  MOD_RES (126)..(126): Gln or Leu
  MOD_RES (150)..(150): Ala or Val
  MOD_RES (164)..(164): Cys or Gly
  MOD_RES (171)..(171): Ala or Gly
  MOD_RES (187)..(187): Arg, Ile, or Lys
  MOD_RES (196)..(196): Ala, Cys, Leu, or Val
  MOD_RES (217)..(217): Leu, Ala, or Val
  MOD_RES (249)..(249): Thr or Ala
  MOD_RES (251)..(251): Asp or Gly
  MOD_RES (257)..(257): Glu or Lys
  MOD_RES (270)..(270): Gln, Ala, His, Phe, or Pro
  MOD_RES (272)..(272): Cys or Val
  MOD_RES (292)..(292): Trp or Arg
  MOD_RES (301)..(301): Ser or Arg
  MOD_RES (302)..(302): Trp or Lys
  MOD_RES (325)..(325): Lys or Val
  MOD_RES (332)..(332): Ala, Cys, Ser, or Val
  MOD_RES (352)..(352): Cys, Leu, or Val
  MOD_RES (363)..(363): Val or Arg
  MOD_RES (365)..(365): Leu, Gln, His, Ile, Lys, or Ser
  See specification as filed for detailed description of substitutions and preferred embodiments
XXSXXXLQXESVFQSGAHAYRIPALLYLPGQQSLLAFAEQRASXXDEHAELIVXRRGDYDAXTHQVQWXAQEVVAQAXLDGHRSMNPCPLYDXQTGTLFLFFIAIPXXVTEXQQLQTRANVTRLXXVTSTDHGRTWSSPRDLTDAAIGPXYREWSTFAVGPGHXLQLHDRXRSLVVPAYAYRKLHPXQRPIPSAFXFLSHDHGRTWARGHFVAQDTXECQVAEVETGEQRVVTLNARSHLRARVQAQSXNXGLDFQXSQLVKKLVEPPPXGXQGSVISFPSPRSGPGSPAQXLLYTHPTHXXQRADLGAYLNPRPPAPEAWSEPXLLAKGSXAYSDLQSMGTGPDGSPLFGXLYEANDYEEIXFXMFTLKQAFPAEYLPQ

SEQ ID NO: 48 - protein, 380 aa, Artificial Sequence
  Description of Artificial Sequence: Synthetic polypeptide
DASLPYLQKESVFQSGAHAYRIPALLYLPGQQSLLAFAEQRASKKDEHAELIVLRRGDYDAGTHQVQWQAQEVVAQARLDGHRSMNPCPLYDEQTGTLFLFFIAIPGQVTEQQQLQTRANVTRLCQVTSTDHGRTWSSPRDLTDAAIGPAYREWSTFAVGPGHCLQLHDRARSLVVPAYAYRKLHPKQRPIPSAFCFLSHDHGRTWARGHFVAQDTLECQVAEVETGEQRVVTLNARSHLRARVQAQSTNDGLDFQESQLVKKLVEPPPQGCQGSVISFPSPRSGPGSPAQWLLYTHPTHSWQRADLGAYLNPRPPAPEAWSEPVLLAKGSAAYSDLQSMGTGPDGSPLFGCLYEANDYEEIVFLMFTLKQAFPAEYLPQ

SEQ ID NO: 49 - protein, 380 aa, Artificial Sequence
  Description of Artificial Sequence: Synthetic polypeptide
DASLPYLQDESVFQSGAHAYRIPALLYLPGQQSLLAFAEQRASKKDEHAELIVLRRGDYDAPTHQVQWQAQEVVAQARLDGHRSMNPCPLYDEQTGTLFLFFIAIPGQVTEQQQLQTRANVTRLCQVTSTDHGRTWSSPRDLTDAAIGPAYREWSTFAVGPGHCLQLHDRARSLVVPAYAYRKLHPKQRPIPSAFCFLSHDHGRTWARGHFVAQDTLECQVAEVETGEQRVVTLNARSHLRARVQAQSTNDGLDFQESQLVKKLVEPPPQGCQGSVISFPSPRSGPGSPAQWLLYTHPTHSWQRADLGAYLNPRPPAPEAWSEPVLLAKGSAAYSDLQSMGTGPDGSPLFGCLYEANDYEEIRFIMFTLKQAFPAEYLPQ

SEQ ID NO: 50 - protein, 380 aa, Artificial Sequence
  Description of Artificial Sequence: Synthetic polypeptide
DASLPYLQKESVFQSGAHAYRIPALLYLPGQQSLLAFAEQRASKKDEHAELIVLRRGDYDANTHQVQWQAQEVVAQARLDGHRSMNPCPLYDAQTGTLFLFFIAIPGQVTEQQQLQTRANVTRLCQVTSTDHGRTWSSPRDLTDAAIGPAYREWSTFAVGPGHCLQLHDRARSLVVPAYAYRKLHPKQRPIPSAFCFLSHDHGRTWARGHFVAQDTLECQVAEVETGEQRVVTLNARSHLRARVQAQSTNDGLDFQESQLVKKLVEPPPQGCQGSVISFPSPRSGPGSPAQWLLYTHPTHSWQRADLGAYLNPRPPAPEAWSEPVLLAKGSAAYSDLQSMGTGPDGSPLFGCLYEANDYEEIVFLMFTLKQAFPAEYLPQ

SEQ ID NO: 51 - protein, 380 aa, Artificial Sequence
  Description of Artificial Sequence: Synthetic polypeptide
DASLPYLQKESVFQSGAHAYRIPALLYLPGQQSLLAFAEQRASKKDEHAELIVLRRGDYDAPTHQVQWQAQEVVAQARLDGHRSMNPCPLYDAQTGTLFLFFIAIPGQVTEQQQLQTRANVTRLCQVTSTDHGRTWSSPRDLTDAAIGPAYREWSTFAVGPGHCLQLHDRARSLVVPAYAYRKLHPKQRPIPSAFCFLSHDHGRTWARGHFVAQDTLECQVAEVETGEQRVVTLNARSHLRARVQAQSTNDGLDFQESQLVKKLVEPPPAGCQGSVISFPSPRSGPGSPAQWLLYTHPTHRKQRADLGAYLNPRPPAPEAWSEPVLLAKGSAAYSDLQSMGTGPDGSPLFGCLYEANDYEEIVFLMFTLKQAFPAEYLPQ

SEQ ID NO: 52 - protein, 380 aa, Artificial Sequence
  Description of Artificial Sequence: Synthetic polypeptide
DASLPYLQKESVFQSGAHAYRIPALLYLPGQQSLLAFAEQRASKKDEHAELIVLRRGDYDASTHQVQWQAQEVVAQARLDGHRSMNPCPLYDAQTGTLFLFFIAIPGQVTEQQQLQTRANVTRLCQVTSTDHGRTWSSPRDLTDAAIGPAYREWSTFAVGPGHCLQLHDRARSLVVPAYAYRKLHPKQRPIPSAFCFLSHDHGRTWARGHFVAQDTLECQVAEVETGEQRVVTLNARSHLRARVQAQSTNDGLDFQESQLVKKLVEPPPAGCQGSVISFPSPRSGPGSPAQWLLYTHPTHRKQRADLGAYLNPRPPAPEAWSEPVLLAKGSAAYSDLQSMGTGPDGSPLFGCLYEANDYEEIVFLMFTLKQAFPAEYLPQ

SEQ ID NO: 53 - protein, 380 aa, Artificial Sequence
  Description of Artificial Sequence: Synthetic polypeptide
DASLPYLQKESVFQSGAHAYRIPALLYLPGQQSLLAFAEQRASKKDEHAELIVLRRGDYDATTHQVQWQAQEVVAQARLDGHRSMNPCPLYDAQTGTLFLFFIAIPGQVTEQQQLQTRANVTRLCQVTSTDHGRTWSSPRDLTDAAIGPAYREWSTFAVGPGHCLQLHDRARSLVVPAYAYRKLHPKQRPIPSAFCFLSHDHGRTWARGHFVAQDTLECQVAEVETGEQRVVTLNARSHLRARVQAQSTNDGLDFQESQLVKKLVEPPPAGCQGSVISFPSPRSGPGSPAQWLLYTHPTHRKQRADLGAYLNPRPPAPEAWSEPVLLAKGSAAYSDLQSMGTGPDGSPLFGCLYEANDYEEIVFLMFTLKQAFPAEYLPQ

SEQ ID NO: 54 - protein, 380 aa, Artificial Sequence
  Description of Artificial Sequence: Synthetic polypeptide
DASLPYLQKESVFQSGAHAYRIPALLYLPGQQSLLAFAEQRASKKDEHAELIVLRRGDYDANTHQVQWQAQEVVAQARLDGHRSMNPCPLYDAQTGTLFLFFIAIPGQVTEQQQLQTRANVTRLCQVTSTDHGRTWSSPRDLTDAAIGPAYREWSTFAVGPGHCLQLHDRARSLVVPAYAYRKLHPKQRPIPSAFCFLSHDHGRTWARGHFVAQDTLECQVAEVETGEQRVVTLNARSHLRARVQAQSTNDGLDFQESQLVKKLVEPPPAGCQGSVISFPSPRSGPGSPAQWLLYTHPTHRKQRADLGAYLNPRPPAPEAWSEPVLLAKGSAAYSDLQSMGTGPDGSPLFGCLYEANDYEEIVFLMFTLKQAFPAEYLPQ

SEQ ID NO: 55 - protein, 379 aa, Artificial Sequence
  Description of Artificial Sequence: Synthetic polypeptide
ASLPYLQKESVFQSGAHAYRIPALLYLPGQQSLLAFAEQRASKKDEHAELIVLRRGDYDAPTHQVQWQAQEVVAQARLDGHRSMNPCPLYDAQTGTLFLFFIAIPGQVTEQQQLQTRANVTRLCQVTSTDHGRTWSSPRDLTDAAIGPAYREWSTFAVGPGHCLQLHDRARSLVVPAYAYRKLHPKQRPIPSAFCFLSHDHGRTWARGHFVAQDTLECQVAEVETGEQRVVTLNARSHLRARVQAQSTNDGLDFQESQLVKKLVEPPPQGCQGSVISFPSPRSGPGSPAQWLLYTHPTHSWQRADLGAYLNPRPPAPEAWSEPVLLAKGSCAYSDLQSMGTGPDGSPLFGCLYEANDYEEIVFLMFTLKQAFPAEYLPQ

SEQ ID NO: 56 - protein, 380 aa, Artificial Sequence
  Description of Artificial Sequence: Synthetic polypeptide
MASLPYLQKESVFQSGAHAYRIPALLYLPGQQSLLAFAEQRASKKDEHAELIVLRRGDYDAPTHQVQWQAQEVVAQARLDGHRSMNPCPLYDAQTGTLFLFFIAIPGQVTEQQQLQTRANVTRLCQVTSTDHGRTWSSPRDLTDAAIGPAYREWSTFAVGPGHCLQLHDRARSLVVPAYAYRKLHPKQRPIPSAFCFLSHDHGRTWARGHFVAQDTLECQVAEVETGEQRVVTLNARSHLRARVQAQSTNDGLDFQESQLVKKLVEPPPQGCQGSVISFPSPRSGPGSPAQWLLYTHPTHSWQRADLGAYLNPRPPAPEAWSEPVLLAKGSCAYSDLQSMGTGPDGSPLFGCLYEANDYEEIVFLMFTLKQAFPAEYLPQ

SEQ ID NO: 57 - protein, 379 aa, Artificial Sequence
  Description of Artificial Sequence: Synthetic polypeptide
ASLPYLQKESVFQSGAHAYRIPALLYLPGQQSLLAFAEQRASKKDEHAELIVLRRGDYDAPTHQVQWQAQEVVAQARLDGHRSMNPCPLYDAQTGTLFLFFIAIPGQVTEQQQLQTRANVTRLCQVTSTDHGRTWSSPRDLTDAAIGPAYREWSTFAVGPGHCLQLHDRARSLVVPAYAYRKLHPKQRPIPSAFCFLSHDHGRTWARGHFVAQDTLECQVAEVETGEQRVVTLNARSHLRARVQAQSTNDGLDFQESQLVKKLVEPPPQGCQGSVISFPSPRSGPGSPAQWLLYTHPTHSWQRADLGAYLNPRPPAPEAWSEPVLLAKGSAAYSDLQSMGTGPDGSPLFGCLYEANDYEEIVFLMFTLKQAFPAEYLPQ

SEQ ID NO: 58 - protein, 380 aa, Artificial Sequence
  Description of Artificial Sequence: Synthetic polypeptide
DASLPYLQKESVFQSGAHAYRIPALLYLPGQQSLLAFAEQRASKKDEHAELIVLRRGDYDAPTHQVQWQAQEVVAQARLDGHRSMNPCPLYDAQTGTLFLFFIAIPGQVTEQQQLQTRANVTRLCQVTSTDHGRTWSSPRDLTDAAIGPAYREWSTFAVGPGHCLQLHDRARSLVVPAYAYRKLHPKQRPIPSAFCFLSHDHGRTWARGHFVAQDTLECQVAEVETGEQRVVTLNARSHLRARVQAQSTNDGLDFQESQLVKKLVEPPPQGCQGSVISFPSPRSGPGSPAQWLLYTHPTHSWQRADLGAYLNPRPPAPEAWSEPVLLAKGSAAYSDLQSMGTGPDGSPLFGCLYEANDYEEIVFLMFTLKQAFPAEYLPQ

SEQ ID NO: 59 - protein, 380 aa, Artificial Sequence
  Description of Artificial Sequence: Synthetic polypeptide
DASLPYLQKESVFQSGAHAYRIPALLYLPGQQSLLAFAEQRASKKDEHAELIVLRRGDYDAPTHQVQWQAQEVVAQARLDGHRSMNPCPLYDAQTGTLFLFFIAIPGQVTEQQQLQTRANVTRLCQVTSTDHGRTWSSPRDLTDAAIGPAYREWSTFAVGPGHCLQLHDRARSLVVPAYAYRKLHPKQRPIPSAFCFLSHDHGRTWARGHFVAQDTLECQVAEVETGEQRVVTLNARSHLRARVQAQSTNDGLDFQESQLVKKLVEPPPQGCQGSVISFPSPRSGPGSPAQWLLYTHPTHSWQRADLGAYLNPRPPAPEAWSEPVLLAKGSCAYSDLQSMGTGPDGSPLFGCLYEANDYEEIVFLMFTLKQAFPAEYLPQ

SEQ ID NO: 60 - protein, 380 aa, Artificial Sequence
  Description of Artificial Sequence: Synthetic polypeptide
AASLPYLQKESVFQSGAHAYRIPALLYLPGQQSLLAFAEQRASKKDEHAELIVLRRGDYDAPTHQVQWQAQEVVAQARLDGHRSMNPCPLYDAQTGTLFLFFIAIPGQVTEQQQLQTRANVTRLCQVTSTDHGRTWSSPRDLTDAAIGPAYREWSTFAVGPGHCLQLHDRARSLVVPAYAYRKLHPKQRPIPSAFCFLSHDHGRTWARGHFVAQDTLECQVAEVETGEQRVVTLNARSHLRARVQAQSTNDGLDFQESQLVKKLVEPPPQGCQGSVISFPSPRSGPGSPAQWLLYTHPTHSWQRADLGAYLNPRPPAPEAWSEPVLLAKGSAAYSDLQSMGTGPDGSPLFGCLYEANDYEEIVFLMFTLKQAFPAEYLPQ

SEQ ID NO: 61 - protein, 380 aa, Artificial Sequence
  Description of Artificial Sequence: Synthetic polypeptide
MASLPYLQKESVFQSGAHAYRIPALLYLPGQQSLLAFAEQRASKKDEHAELIVLRRGDYDAPTHQVQWQAQEVVAQARLDGHRSMNPCPLYDAQTGTLFLFFIAIPGQVTEQQQLQTRANVTRLCQVTSTDHGRTWSSPRDLTDAAIGPAYREWSTFAVGPGHCLQLHDRARSLVVPAYAYRKLHPKQRPIPSAFCFLSHDHGRTWARGHFVAQDTLECQVAEVETGEQRVVTLNARSHLRARVQAQSTNDGLDFQESQLVKKLVEPPPQGCQGSVISFPSPRSGPGSPAQWLLYTHPTHSWQRADLGAYLNPRPPAPEAWSEPVLLAKGSAAYSDLQSMGTGPDGSPLFGCLYEANDYEEIVFLMFTLKQAFPAEYLPQ

SEQ ID NO: 62 - protein, 380 aa, Artificial Sequence
  Description of Artificial Sequence: Synthetic polypeptide
AASLPYLQKESVFQSGAHAYRIPALLYLPGQQSLLAFAEQRASKKDEHAELIVLRRGDYDAPTHQVQWQAQEVVAQARLDGHRSMNPCPLYDAQTGTLFLFFIAIPGQVTEQQQLQTRANVTRLCQVTSTDHGRTWSSPRDLTDAAIGPAYREWSTFAVGPGHCLQLHDRARSLVVPAYAYRKLHPKQRPIPSAFCFLSHDHGRTWARGHFVAQDTLECQVAEVETGEQRVVTLNARSHLRARVQAQSTNDGLDFQESQLVKKLVEPPPQGCQGSVISFPSPRSGPGSPAQWLLYTHPTHSWQRADLGAYLNPRPPAPEAWSEPVLLAKGSCAYSDLQSMGTGPDGSPLFGCLYEANDYEEIVFLMFTLKQAFPAEYLPQ

SEQ ID NO: 63 - protein, 450 aa, Artificial Sequence
  Description of Artificial Sequence: Synthetic polypeptide
EVQLVESGGGLVQPGGSLRLSCAASGFNIKDTYIHWVRQAPGKGLEWVARIYPTNGYTRYADSVKGRFTISADTSKNTAYLQMNSLRAEDTAVYYCSRWGGDGFYAMDYWGQGTLVTVSSASTKGPSVFPLAPSSKSTSGGTAALGCLVKDYFPEPVTVSWNSGALTSGVHTFPAVLQSSGLYSLSSVVTVPSSSLGTQTYICNVNHKPSNTKVDKKVEPKSCDKTHTCPPCPAPELLGGPSVFLFPPKPKDTLMISRTPEVTCVVVDVSHEDPEVKFNWYVDGVEVHNAKTKPREEQYNSTYRVVSVLTVLHQDWLNGKEYKCKVSNKALPAPIEKTISKAKGQPREPQVYTLPPSREEMTKNQVSLYCLVKGFYPSDIAVEWESNGQPENNYKTTPPVLDSDGSFFLYSKLTVDKSRWQQGNVFSCSVMHEALHNHYTQKSLSLSPGK

SEQ ID NO: 64 - protein, 214 aa, Artificial Sequence
  Description of Artificial Sequence: Synthetic polypeptide
DIQMTQSPSSLSASVGDRVTITCRASQDVNTAVAWYQQKPGKAPKLLIYSASFLYSGVPSRFSGSRSGTDFTLTISSLQPEDFATYYCQQHYTTPPTFGQGTKVEIKRTVAAPSVFIFPPSDEQLKSGTASVVCLLNNFYPREAKVQWKVDNALQSGNSQESVTEQDSKDSTYSLSSTLTLSKADYEKHKVYACEVTHQGLSSPVTKSFNRGEC

SEQ ID NO: 65 - protein, 242 aa, Artificial Sequence
  Description of Artificial Sequence: Synthetic polypeptide
EVQLVESGGGLVQPGGSLRLSCAASGFNIKDTYIHWVRQAPGKGLEWVARIYPTNGYTRYADSVKGRFTISADTSKNTAYLQMNSLRAEDTAVYYCSRWGGDGFYAMDYWGQGTLVTVSSGGGGSGGGGSGGGGSDIQMTQSPSSLSASVGDRVTITCRASQDVNTAVAWYQQKPGKAPKLLIYSASFLYSGVPSRFSGSRSGTDFTLTISSLQPEDFATYYCQQHYTTPPTFGQGTKVEIK

SEQ ID NO: 66 - protein, 214 aa, Artificial Sequence; identical to SEQ ID NO: 64
  Description of Artificial Sequence: Synthetic polypeptide

SEQ ID NO: 67 - protein, 450 aa, Artificial Sequence; identical to SEQ ID NO: 63
  Description of Artificial Sequence: Synthetic polypeptide

SEQ ID NO: 68 - protein, 617 aa, Artificial Sequence
  Description of Artificial Sequence: Synthetic polypeptide
DASLPYLQKESVFQSGAHAYRIPALLYLPGQQSLLAFAEQRASKKDEHAELIVLRRGDYDAGTHQVQWQAQEVVAQARLDGHRSMNPCPLYDEQTGTLFLFFIAIPGQVTEQQQLQTRANVTRLCQVTSTDHGRTWSSPRDLTDAAIGPAYREWSTFAVGPGHCLQLHDRARSLVVPAYAYRKLHPKQRPIPSAFCFLSHDHGRTWARGHFVAQDTLECQVAEVETGEQRVVTLNARSHLRARVQAQSTNDGLDFQESQLVKKLVEPPPQGCQGSVISFPSPRSGPGSPAQWLLYTHPTHSWQRADLGAYLNPRPPAPEAWSEPVLLAKGSAAYSDLQSMGTGPDGSPLFGCLYEANDYEEIVFLMFTLKQAFPAEYLPQGGGGSGGGGSDKTHTCPPCPAPELLGGPSVFLFPPKPKDTLMISRTPEVTCVVVDVSHEDPEVKFNWYVDGVEVHNAKTKPREEQYNSTYRVVSVLTVLHQDWLNGKEYKCKVSNKALPAPIEKTISKAKGQPREPQVYTLPPSREEMTKNQVSLTCLVKGFYPSDIAVEWESNGQPENNYKTTPPVLDSDGSFFLTSKLTVDKSRWQQGNVFSCSVMHEALHNHYTQKSLSLSPGK

SEQ ID NO: 69 - protein, 617 aa, Artificial Sequence
  Description of Artificial Sequence: Synthetic polypeptide
DASLPYLQDESVFQSGAHAYRIPALLYLPGQQSLLAFAEQRASKKDEHAELIVLRRGDYDAPTHQVQWQAQEVVAQARLDGHRSMNPCPLYDEQTGTLFLFFIAIPGQVTEQQQLQTRANVTRLCQVTSTDHGRTWSSPRDLTDAAIGPAYREWSTFAVGPGHCLQLHDRARSLVVPAYAYRKLHPKQRPIPSAFCFLSHDHGRTWARGHFVAQDTLECQVAEVETGEQRVVTLNARSHLRARVQAQSTNDGLDFQESQLVKKLVEPPPQGCQGSVISFPSPRSGPGSPAQWLLYTHPTHSWQRADLGAYLNPRPPAPEAWSEPVLLAKGSAAYSDLQSMGTGPDGSPLFGCLYEANDYEEIRFIMFTLKQAFPAEYLPQGGGGSGGGGSDKTHTCPPCPAPELLGGPSVFLFPPKPKDTLMISRTPEVTCVVVDVSHEDPEVKFNWYVDGVEVHNAKTKPREEQYNSTYRVVSVLTVLHQDWLNGKEYKCKVSNKALPAPIEKTISKAKGQPREPQVYTLPPSREEMTKNQVSLTCLVKGFYPSDIAVEWESNGQPENNYKTTPPVLDSDGSFFLTSKLTVDKSRWQQGNVFSCSVMHEALHNHYTQKSLSLSPGK

SEQ ID NO: 70 - protein, 617 aa, Artificial Sequence
  Description of Artificial Sequence: Synthetic polypeptide
DASLPYLQKESVFQSGAHAYRIPALLYLPGQQSLLAFAEQRASKKDEHAELIVLRRGDYDANTHQVQWQAQEVVAQARLDGHRSMNPCPLYDAQTGTLFLFFIAIPGQVTEQQQLQTRANVTRLCQVTSTDHGRTWSSPRDLTDAAIGPAYREWSTFAVGPGHCLQLHDRARSLVVPAYAYRKLHPKQRPIPSAFCFLSHDHGRTWARGHFVAQDTLECQVAEVETGEQRVVTLNARSHLRARVQAQSTNDGLDFQESQLVKKLVEPPPQGCQGSVISFPSPRSGPGSPAQWLLYTHPTHSWQRADLGAYLNPRPPAPEAWSEPVLLAKGSAAYSDLQSMGTGPDGSPLFGCLYEANDYEEIVFLMFTLKQAFPAEYLPQGGGGSGGGGSDKTHTCPPCPAPELLGGPSVFLFPPKPKDTLMISRTPEVTCVVVDVSHEDPEVKFNWYVDGVEVHNAKTKPREEQYNSTYRVVSVLTVLHQDWLNGKEYKCKVSNKALPAPIEKTISKAKGQPREPQVYTLPPSREEMTKNQVSLTCLVKGFYPSDIAVEWESNGQPENNYKTTPPVLDSDGSFFLTSKLTVDKSRWQQGNVFSCSVMHEALHNHYTQKSLSLSPGK

SEQ ID NO: 71 - protein, 617 aa, Artificial Sequence
  Description of Artificial Sequence: Synthetic polypeptide
DASLPYLQKESVFQSGAHAYRIPALLYLPGQQSLLAFAEQRASKKDEHAELIVLRRGDYDAPTHQVQWQAQEVVAQARLDGHRSMNPCPLYDAQTGTLFLFFIAIPGQVTEQQQLQTRANVTRLCQVTSTDHGRTWSSPRDLTDAAIGPAYREWSTFAVGPGHCLQLHDRARSLVVPAYAYRKLHPKQRPIPSAFCFLSHDHGRTWARGHFVAQDTLECQVAEVETGEQRVVTLNARSHLRARVQAQSTNDGLDFQESQLVKKLVEPPPAGCQGSVISFPSPRSGPGSPAQWLLYTHPTHRKQRADLGAYLNPRPPAPEAWSEPVLLAKGSAAYSDLQSMGTGPDGSPLFGCLYEANDYEEIVFLMFTLKQAFPAEYLPQGGGGSGGGGSDKTHTCPPCPAPELLGGPSVFLFPPKPKDTLMISRTPEVTCVVVDVSHEDPEVKFNWYVDGVEVHNAKTKPREEQYNSTYRVVSVLTVLHQDWLNGKEYKCKVSNKALPAPIEKTISKAKGQPREPQVYTLPPSREEMTKNQVSLTCLVKGFYPSDIAVEWESNGQPENNYKTTPPVLDSDGSFFLTSKLTVDKSRWQQGNVFSCSVMHEALHNHYTQKSLSLSPGK

SEQ ID NO: 72 - protein, 617 aa, Artificial Sequence
  Description of Artificial Sequence: Synthetic polypeptide
DASLPYLQKESVFQSGAHAYRIPALLYLPGQQSLLAFAEQRASKKDEHAELIVLRRGDYDASTHQVQWQAQEVVAQARLDGHRSMNPCPLYDAQTGTLFLFFIAIPGQVTEQQQLQTRANVTRLCQVTSTDHGRTWSSPRDLTDAAIGPAYREWSTFAVGPGHCLQLHDRARSLVVPAYAYRKLHPKQRPIPSAFCFLSHDHGRTWARGHFVAQDTLECQVAEVETGEQRVVTLNARSHLRARVQAQSTNDGLDFQESQLVKKLVEPPPAGCQGSVISFPSPRSGPGSPAQWLLYTHPTHRKQRADLGAYLNPRPPAPEAWSEPVLLAKGSAAYSDLQSMGTGPDGSPLFGCLYEANDYEEIVFLMFTLKQAFPAEYLPQGGGGSGGGGSDKTHTCPPCPAPELLGGPSVFLFPPKPKDTLMISRTPEVTCVVVDVSHEDPEVKFNWYVDGVEVHNAKTKPREEQYNSTYRVVSVLTVLHQDWLNGKEYKCKVSNKALPAPIEKTISKAKGQPREPQVYTLPPSREEMTKNQVSLTCLVKGFYPSDIAVEWESNGQPENNYKTTPPVLDSDGSFFLTSKLTVDKSRWQQGNVFSCSVMHEALHNHYTQKSLSLSPGK

SEQ ID NO: 73 - protein, 617 aa, Artificial Sequence
  Description of Artificial Sequence: Synthetic polypeptide
DASLPYLQKESVFQSGAHAYRIPALLYLPGQQSLLAFAEQRASKKDEHAELIVLRRGDYDATTHQVQWQAQEVVAQARLDGHRSMNPCPLYDAQTGTLFLFFIAIPGQVTEQQQLQTRANVTRLCQVTSTDHGRTWSSPRDLTDAAIGPAYREWSTFAVGPGHCLQLHDRARSLVVPAYAYRKLHPKQRPIPSAFCFLSHDHGRTWARGHFVAQDTLECQVAEVETGEQRVVTLNARSHLRARVQAQSTNDGLDFQESQLVKKLVEPPPAGCQGSVISFPSPRSGPGSPAQWLLYTHPTHRKQRADLGAYLNPRPPAPEAWSEPVLLAKGSAAYSDLQSMGTGPDGSPLFGCLYEANDYEEIVFLMFTLKQAFPAEYLPQGGGGSGGGGSDKTHTCPPCPAPELLGGPSVFLFPPKPKDTLMISRTPEVTCVVVDVSHEDPEVKFNWYVDGVEVHNAKTKPREEQYNSTYRVVSVLTVLHQDWLNGKEYKCKVSNKALPAPIEKTISKAKGQPREPQVYTLPPSREEMTKNQVSLTCLVKGFYPSDIAVEWESNGQPENNYKTTPPVLDSDGSFFLTSKLTVDKSRWQQGNVFSCSVMHEALHNHYTQKSLSLSPGK

SEQ ID NO: 74 - protein, 617 aa, Artificial Sequence
  Description of Artificial Sequence: Synthetic polypeptide
DASLPYLQKESVFQSGAHAYRIPALLYLPGQQSLLAFAEQRASKKDEHAELIVLRRGDYDANTHQVQWQAQEVVAQARLDGHRSMNPCPLYDAQTGTLFLFFIAIPGQVTEQQQLQTRANVTRLCQVTSTDHGRTWSSPRDLTDAAIGPAYREWSTFAVGPGHCLQLHDRARSLVVPAYAYRKLHPKQRPIPSAFCFLSHDHGRTWARGHFVAQDTLECQVAEVETGEQRVVTLNARSHLRARVQAQSTNDGLDFQESQLVKKLVEPPPAGCQGSVISFPSPRSGPGSPAQWLLYTHPTHRKQRADLGAYLNPRPPAPEAWSEPVLLAKGSAAYSDLQSMGTGPDGSPLFGCLYEANDYEEIVFLMFTLKQAFPAEYLPQGGGGSGGGGSDKTHTCPPCPAPELLGGPSVFLFPPKPKDTLMISRTPEVTCVVVDVSHEDPEVKFNWYVDGVEVHNAKTKPREEQYNSTYRVVSVLTVLHQDWLNGKEYKCKVSNKALPAPIEKTISKAKGQPREPQVYTLPPSREEMTKNQVSLTCLVKGFYPSDIAVEWESNGQPENNYKTTPPVLDSDGSFFLTSKLTVDKSRWQQGNVFSCSVMHEALHNHYTQKSLSLSPGK

SEQ ID NO: 75 - protein, 617 aa, Artificial Sequence
  Description of Artificial Sequence: Synthetic polypeptide
  MOD_RES (1)..(1): Ala, Arg, Asn, Asp, Gln, Glu, Gly, His, Leu, Lys, Met, Phe, Thr, Val, or not present
  MOD_RES (6)..(6): Phe, Trp, Tyr or Val
  MOD_RES (9)..(9): Lys or Asp
  MOD_RES (62)..(62): Pro, Asn, Asp, His, Glu, Gly, Ser or Thr
  MOD_RES (93)..(93): Ala, Glu, or Lys
  MOD_RES (187)..(187): Arg, Ile, or Lys
  MOD_RES (270)..(270): Gln, Ala, His, Phe, or Pro
  MOD_RES (301)..(301): Ser or Arg
  MOD_RES (302)..(302): Trp or Lys
  MOD_RES (332)..(332): Ala, Cys, Ser, or Val
  MOD_RES (363)..(363): Val or Arg
  MOD_RES (365)..(365): Leu, Gln, His, Ile, Lys, or Ser
  See specification as filed for detailed description of substitutions and preferred embodiments
XASLPXLQXESVFQSGAHAYRIPALLYLPGQQSLLAFAEQRASKKDEHAELIVLRRGDYDAXTHQVQWQAQEVVAQARLDGHRSMNPCPLYDXQTGTLFLFFIAIPGQVTEQQQLQTRANVTRLCQVTSTDHGRTWSSPRDLTDAAIGPAYREWSTFAVGPGHCLQLHDRARSLVVPAYAYRKLHPXQRPIPSAFCFLSHDHGRTWARGHFVAQDTLECQVAEVETGEQRVVTLNARSHLRARVQAQSTNDGLDFQESQLVKKLVEPPPXGCQGSVISFPSPRSGPGSPAQWLLYTHPTHXXQRADLGAYLNPRPPAPEAWSEPVLLAKGSXAYSDLQSMGTGPDGSPLFGCLYEANDYEEIXFXMFTLKQAFPAEYLPQGGGGSGGGGSDKTHTCPPCPAPELLGGPSVFLFPPKPKDTLMISRTPEVTCVVVDVSHEDPEVKFNWYVDGVEVHNAKTKPREEQYNSTYRVVSVLTVLHQDWLNGKEYKCKVSNKALPAPIEKTISKAKGQPREPQVYTLPPSREEMTKNQVSLTCLVKGFYPSDIAVEWESNGQPENNYKTTPPVLDSDGSFFLTSKLTVDKSRWQQGNVFSCSVMHEALHNHYTQKSLSLSPGK

SEQ ID NO: 76 - protein, 617 aa, Artificial Sequence
  Description of Artificial Sequence: Synthetic polypeptide
  MOD_RES (1)..(1): Ala, Arg, Asn, Asp, Gln, Glu, Gly, His, Leu, Lys, Met, Phe, Thr, Val, or not present
  MOD_RES (2)..(2): Ala or Lys
  MOD_RES (4)..(4): Asn or Leu
  MOD_RES (5)..(5): Pro or His
  MOD_RES (6)..(6): Phe, Trp, Tyr or Val
  MOD_RES (9)..(9): Lys or Asp
  MOD_RES (44)..(44): Lys, Arg, or Glu
  MOD_RES (45)..(45): Lys, Ala, Arg, or Glu
  MOD_RES (54)..(54): Leu or Met
  MOD_RES (62)..(62): Pro, Asn, Asp, His, Glu, Gly, Ser or Thr
  MOD_RES (69)..(69): Gln or His
  MOD_RES (78)..(78): Arg or Lys
  MOD_RES (93)..(93): Ala, Glu or Lys
  MOD_RES (107)..(107): Gly or Asp
  MOD_RES (108)..(108): Gln or His
  MOD_RES (112)..(112): Gln, Arg, or Lys
  MOD_RES (125)..(125): Ala, Cys, Ile, Ser, Val, or Leu
  MOD_RES (126)..(126): Gln or Leu
  MOD_RES (150)..(150): Ala or Val
  MOD_RES (164)..(164): Cys or Gly
  MOD_RES (171)..(171): Ala or Gly
  MOD_RES (187)..(187): Arg, Ile, or Lys
  MOD_RES (196)..(196): Ala, Cys, Leu, or Val
  MOD_RES (217)..(217): Leu, Ala, or Val
  MOD_RES (249)..(249): Thr or Ala
  MOD_RES (251)..(251): Asp or Gly
  MOD_RES (257)..(257): Glu or Lys
  MOD_RES (270)..(270): Gln, Ala, His, Phe, or Pro
  MOD_RES (272)..(272): Cys or Val
  MOD_RES (292)..(292): Trp or Arg
  MOD_RES (301)..(301): Ser or Arg
  MOD_RES (302)..(302): Trp or Lys
  MOD_RES (325)..(325): Lys or Val
  MOD_RES (332)..(332): Ala, Cys, Ser, or Val
  MOD_RES (352)..(352): Cys, Leu, or Val
  MOD_RES (363)..(363): Val or Arg
  MOD_RES (365)..(365): Leu, Gln, His, Ile, Lys, or Ser
  See specification as filed for detailed description of substitutions and preferred embodiments
XXSXXXLQXESVFQSGAHAYRIPALLYLPGQQSLLAFAEQRASXXDEHAELIVXRRGDYDAXTHQVQWXAQEVVAQAXLDGHRSMNPCPLYDXQTGTLFLFFIAIPXXVTEXQQLQTRANVTRLXXVTSTDHGRTWSSPRDLTDAAIGPXYREWSTFAVGPGHXLQLHDRXRSLVVPAYAYRKLHPXQRPIPSAFXFLSHDHGRTWARGHFVAQDTXECQVAEVETGEQRVVTLNARSHLRARVQAQSXNXGLDFQXSQLVKKLVEPPPXGXQGSVISFPSPRSGPGSPAQXLLYTHPTHXXQRADLGAYLNPRPPAPEAWSEPXLLAKGSXAYSDLQSMGTGPDGSPLFGXLYEANDYEEIXFXMFTLKQAFPAEYLPQGGGGSGGGGSDKTHTCPPCPAPELLGGPSVFLFPPKPKDTLMISRTPEVTCVVVDVSHEDPEVKFNWYVDGVEVHNAKTKPREEQYNSTYRVVSVLTVLHQDWLNGKEYKCKVSNKALPAPIEKTISKAKGQPREPQVYTLPPSREEMTKNQVSLTCLVKGFYPSDIAVEWESNGQPENNYKTTPPVLDSDGSFFLTSKLTVDKSRWQQGNVFSCSVMHEALHNHYTQKSLSLSPGK

SEQ ID NO: 77 - protein, 874 aa, Artificial Sequence
  Description of Artificial Sequence: Synthetic polypeptide
DASLPYLQKESVFQSGAHAYRIPALLYLPGQQSLLAFAEQRASKKDEHAELIVLRRGDYDAGTHQVQWQAQEVVAQARLDGHRSMNPCPLYDEQTGTLFLFFIAIPGQVTEQQQLQTRANVTRLCQVTSTDHGRTWSSPRDLTDAAIGPAYREWSTFAVGPGHCLQLHDRARSLVVPAYAYRKLHPKQRPIPSAFCFLSHDHGRTWARGHFVAQDTLECQVAEVETGEQRVVTLNARSHLRARVQAQSTNDGLDFQESQLVKKLVEPPPQGCQGSVISFPSPRSGPGSPAQWLLYTHPTHSWQRADLGAYLNPRPPAPEAWSEPVLLAKGSAAYSDLQSMGTGPDGSPLFGCLYEANDYEEIVFLMFTLKQAFPAEYLPQGGGGSGGGGSDKTHTCPPCPAPELLGGPSVFLFPPKPKDTLMISRTPEVTCVVVDVSHEDPEVKFNWYVDGVEVHNAKTKPREEQYNSTYRVVSVLTVLHQDWLNGKEYKCKVSNKALPAPIEKTISKAKGQPREPQVYTLPPSREEMTKNQVSLTCLVKGFYPSDIAVEWESNGQPENNYKTTPPVLDSDGSFFLYSKLTVDKSRWQQGNVFSCSVMHEALHNHYTQKSLSLSPGKGGGGSGGGGSGGGGSEVQLVESGGGLVQPGGSLRLSCAASGFNIKDTYIHWVRQAPGKGLEWVARIYPTNGYTRYADSVKGRFTISADTSKNTAYLQMNSLRAEDTAVYYCSRWGGDGFYAMDYWGQGTLVTVSSGGGGSGGGGSGGGGSDIQMTQSPSSLSASVGDRVTITCRASQDVNTAVAWYQQKPGKAPKLLIYSASFLYSGVPSRFSGSRSGTDFTLTISSLQPEDFATYYCQQHYTTPPTFGQGTKVEIK

SEQ ID NO: 78 - protein, 874 aa, Artificial Sequence
  Description of Artificial Sequence: Synthetic polypeptide
DASLPYLQDESVFQSGAHAYRIPALLYLPGQQSLLAFAEQRASKKDEHAELIVLRRGDYDAPTHQVQWQAQEVVAQARLDGHRSMNPCPLYDEQTGTLFLFFIAIPGQVTEQQQLQTRANVTRLCQVTSTDHGRTWSSPRDLTDAAIGPAYREWSTFAVGPGHCLQLHDRARSLVVPAYAYRKLHPKQRPIPSAFCFLSHDHGRTWARGHFVAQDTLECQVAEVETGEQRVVTLNARSHLRARVQAQSTNDGLDFQESQLVKKLVEPPPQGCQGSVISFPSPRSGPGSPAQWLLYTHPTHSWQRADLGAYLNPRPPAPEAWSEPVLLAKGSAAYSDLQSMGTGPDGSPLFGCLYEANDYEEIRFIMFTLKQAFPAEYLPQGGGGSGGGGSDKTHTCPPCPAPELLGGPSVFLFPPKPKDTLMISRTPEVTCVVVDVSHEDPEVKFNWYVDGVEVHNAKTKPREEQYNSTYRVVSVLTVLHQDWLNGKEYKCKVSNKALPAPIEKTISKAKGQPREPQVYTLPPSREEMTKNQVSLTCLVKGFYPSDIAVEWESNGQPENNYKTTPPVLDSDGSFFLYSKLTVDKSRWQQGNVFSCSVMHEALHNHYTQKSLSLSPGKGGGGSGGGGSGGGGSEVQLVESGGGLVQPGGSLRLSCAASGFNIKDTYIHWVRQAPGKGLEWVARIYPTNGYTRYADSVKGRFTISADTSKNTAYLQMNSLRAEDTAVYYCSRWGGDGFYAMDYWGQGTLVTVSSGGGGSGGGGSGGGGSDIQMTQSPSSLSASVGDRVTITCRASQDVNTAVAWYQQKPGKAPKLLIYSASFLYSGVPSRFSGSRSGTDFTLTISSLQPEDFATYYCQQHYTTPPTFGQGTKVEIK

SEQ ID NO: 79 - protein, 874 aa, Artificial Sequence
  Description of Artificial Sequence: Synthetic polypeptide
DASLPYLQKESVFQSGAHAYRIPALLYLPGQQSLLAFAEQRASKKDEHAELIVLRRGDYDANTHQVQWQAQEVVAQARLDGHRSMNPCPLYDAQTGTLFLFFIAIPGQVTEQQQLQTRANVTRLCQVTSTDHGRTWSSPRDLTDAAIGPAYREWSTFAVGPGHCLQLHDRARSLVVPAYAYRKLHPKQRPIPSAFCFLSHDHGRTWARGHFVAQDTLECQVAEVETGEQRVVTLNARSHLRARVQAQSTNDGLDFQESQLVKKLVEPPPQGCQGSVISFPSPRSGPGSPAQWLLYTHPTHSWQRADLGAYLNPRPPAPEAWSEPVLLAKGSAAYSDLQSMGTGPDGSPLFGCLYEANDYEEIVFLMFTLKQAFPAEYLPQGGGGSGGGGSDKTHTCPPCPAPELLGGPSVFLFPPKPKDTLMISRTPEVTCVVVDVSHEDPEVKFNWYVDGVEVHNAKTKPREEQYNSTYRVVSVLTVLHQDWLNGKEYKCKVSNKALPAPIEKTISKAKGQPREPQVYTLPPSREEMTKNQVSLTCLVKGFYPSDIAVEWESNGQPENNYKTTPPVLDSDGSFFLYSKLTVDKSRWQQGNVFSCSVMHEALHNHYTQKSLSLSPGKGGGGSGGGGSGGGGSEVQLVESGGGLVQPGGSLRLSCAASGFNIKDTYIHWVRQAPGKGLEWVARIYPTNGYTRYADSVKGRFTISADTSKNTAYLQMNSLRAEDTAVYYCSRWGGDGFYAMDYWGQGTLVTVSSGGGGSGGGGSGGGGSDIQMTQSPSSLSASVGDRVTITCRASQDVNTAVAWYQQKPGKAPKLLIYSASFLYSGVPSRFSGSRSGTDFTLTISSLQPEDFATYYCQQHYTTPPTFGQGTKVEIK

SEQ ID NO: 80 - protein, 874 aa, Artificial Sequence
  Description of Artificial Sequence: Synthetic polypeptide
DASLPYLQKESVFQSGAHAYRIPALLYLPGQQSLLAFAEQRASKKDEHAELIVLRRGDYDAPTHQVQWQAQEVVAQARLDGHRSMNPCPLYDAQTGTLFLFFIAIPGQVTEQQQLQTRANVTRLCQVTSTDHGRTWSSPRDLTDAAIGPAYREWSTFAVGPGHCLQLHDRARSLVVPAYAYRKLHPKQRPIPSAFCFLSHDHGRTWARGHFVAQDTLECQVAEVETGEQRVVTLNARSHLRARVQAQSTNDGLDFQESQLVKKLVEPPPAGCQGSVISFPSPRSGPGSPAQWLLYTHPTHRKQRADLGAYLNPRPPAPEAWSEPVLLAKGSAAYSDLQSMGTGPDGSPLFGCLYEANDYEEIVFLMFTLKQAFPAEYLPQGGGGSGGGGSDKTHTCPPCPAPELLGGPSVFLFPPKPKDTLMISRTPEVTCVVVDVSHEDPEVKFNWYVDGVEVHNAKTKPREEQYNSTYRVVSVLTVLHQDWLNGKEYKCKVSNKALPAPIEKTISKAKGQPREPQVYTLPPSREEMTKNQVSLTCLVKGFYPSDIAVEWESNGQPENNYKTTPPVLDSDGSFFLYSKLTVDKSRWQQGNVFSCSVMHEALHNHYTQKSLSLSPGKGGGGSGGGGSGGGGSEVQLVESGGGLVQPGGSLRLSCAASGFNIKDTYIHWVRQAPGKGLEWVARIYPTNGYTRYADSVKGRFTISADTSKNTAYLQMNSLRAEDTAVYYCSRWGGDGFYAMDYWGQGTLVTVSSGGGGSGGGGSGGGGSDIQMTQSPSSLSASVGDRVTITCRASQDVNTAVAWYQQKPGKAPKLLIYSASFLYSGVPSRFSGSRSGTDFTLTISSLQPEDFATYYCQQHYTTPPTFGQGTKVEIK

SEQ ID NO: 81 - protein, 874 aa, Artificial Sequence
  Description of Artificial Sequence: Synthetic polypeptide
DASLPYLQKESVFQSGAHAYRIPALLYLPGQQSLLAFAEQRASKKDEHAELIVLRRGDYDASTHQVQWQAQEVVAQARLDGHRSMNPCPLYDAQTGTLFLFFIAIPGQVTEQQQLQTRANVTRLCQVTSTDHGRTWSSPRDLTDAAIGPAYREWSTFAVGPGHCLQLHDRARSLVVPAYAYRKLHPKQRPIPSAFCFLSHDHGRTWARGHFVAQDTLECQVAEVETGEQRVVTLNARSHLRARVQAQSTNDGLDFQESQLVKKLVEPPPAGCQGSVISFPSPRSGPGSPAQWLLYTHPTHRKQRADLGAYLNPRPPAPEAWSEPVLLAKGSAAYSDLQSMGTGPDGSPLFGCLYEANDYEEIVFLMFTLKQAFPAEYLPQGGGGSGGGGSDKTHTCPPCPAPELLGGPSVFLFPPKPKDTLMISRTPEVTCVVVDVSHEDPEVKFNWYVDGVEVHNAKTKPREEQYNSTYRVVSVLTVLHQDWLNGKEYKCKVSNKALPAPIEKTISKAKGQPREPQVYTLPPSREEMTKNQVSLTCLVKGFYPSDIAVEWESNGQPENNYKTTPPVLDSDGSFFLYSKLTVDKSRWQQGNVFSCSVMHEALHNHYTQKSLSLSPGKGGGGSGGGGSGGGGSEVQLVESGGGLVQPGGSLRLSCAASGFNIKDTYIHWVRQAPGKGLEWVARIYPTNGYTRYADSVKGRFTISADTSKNTAYLQMNSLRAEDTAVYYCSRWGGDGFYAMDYWGQGTLVTVSSGGGGSGGGGSGGGGSDIQMTQSPSSLSASVGDRVTITCRASQDVNTAVAWYQQKPGKAPKLLIYSASFLYSGVPSRFSGSRSGTDFTLTISSLQPEDFATYYCQQHYTTPPTFGQGTKVEIK

SEQ ID NO: 82 - protein, 874 aa, Artificial Sequence
  Description of Artificial Sequence: Synthetic polypeptide
DASLPYLQKESVFQSGAHAYRIPALLYLPGQQSLLAFAEQRASKKDEHAELIVLRRGDYDATTHQVQWQAQEVVAQARLDGHRSMNPCPLYDAQTGTLFLFFIAIPGQVTEQQQLQTRANVTRLCQVTSTDHGRTWSSPRDLTDAAIGPAYREWSTFAVGPGHCLQLHDRARSLVVPAYAYRKLHPKQRPIPSAFCFLSHDHGRTWARGHFVAQDTLECQVAEVETGEQRVVTLNARSHLRARVQAQSTNDGLDFQESQLVKKLVEPPPAGCQGSVISFPSPRSGPGSPAQWLLYTHPTHRKQRADLGAYLNPRPPAPEAWSEPVLLAKGSAAYSDLQSMGTGPDGSPLFGCLYEANDYEEIVFLMFTLKQAFPAEYLPQGGGGSGGGGSDKTHTCPPCPAPELLGGPSVFLFPPKPKDTLMISRTPEVTCVVVDVSHEDPEVKFNWYVDGVEVHNAKTKPREEQYNSTYRVVSVLTVLHQDWLNGKEYKCKVSNKALPAPIEKTISKAKGQPREPQVYTLPPSREEMTKNQVSLTCLVKGFYPSDIAVEWESNGQPENNYKTTPPVLDSDGSFFLYSKLTVDKSRWQQGNVFSCSVMHEALHNHYTQKSLSLSPGKGGGGSGGGGSGGGGSEVQLVESGGGLVQPGGSLRLSCAASGFNIKDTYIHWVRQAPGKGLEWVARIYPTNGYTRYADSVKGRFTISADTSKNTAYLQMNSLRAEDTAVYYCSRWGGDGFYAMDYWGQGTLVTVSSGGGGSGGGGSGGGGSDIQMTQSPSSLSASVGDRVTITCRASQDVNTAVAWYQQKPGKAPKLLIYSASFLYSGVPSRFSGSRSGTDFTLTISSLQPEDFATYYCQQHYTTPPTFGQGTKVEIK

SEQ ID NO: 83 - protein, 874 aa, Artificial Sequence
  Description of Artificial Sequence: Synthetic polypeptide
DASLPYLQKESVFQSGAHAYRIPALLYLPGQQSLLAFAEQRASKKDEHAELIVLRRGDYDANTHQVQWQAQEVVAQARLDGHRSMNPCPLYDAQTGTLFLFFIAIPGQVTEQQQLQTRANVTRLCQVTSTDHGRTWSSPRDLTDAAIGPAYREWSTFAVGPGHCLQLHDRARSLVVPAYAYRKLHPKQRPIPSAFCFLSHDHGRTWARGHFVAQDTLECQVAEVETGEQRVVTLNARSHLRARVQAQSTNDGLDFQESQLVKKLVEPPPAGCQGSVISFPSPRSGPGSPAQWLLYTHPTHRKQRADLGAYLNPRPPAPEAWSEPVLLAKGSAAYSDLQSMGTGPDGSPLFGCLYEANDYEEIVFLMFTLKQAFPAEYLPQGGGGSGGGGSDKTHTCPPCPAPELLGGPSVFLFPPKPKDTLMISRTPEVTCVVVDVSHEDPEVKFNWYVDGVEVHNAKTKPREEQYNSTYRVVSVLTVLHQDWLNGKEYKCKVSNKALPAPIEKTISKAKGQPREPQVYTLPPSREEMTKNQVSLTCLVKGFYPSDIAVEWESNGQPENNYKTTPPVLDSDGSFFLYSKLTVDKSRWQQGNVFSCSVMHEALHNHYTQKSLSLSPGKGGGGSGGGGSGGGGSEVQLVESGGGLVQPGGSLRLSCAASGFNIKDTYIHWVRQAPGKGLEWVARIYPTNGYTRYADSVKGRFTISADTSKNTAYLQMNSLRAEDTAVYYCSRWGGDGFYAMDYWGQGTLVTVSSGGGGSGGGGSGGGGSDIQMTQSPSSLSASVGDRVTITCRASQDVNTAVAWYQQKPGKAPKLLIYSASFLYSGVPSRFSGSRSGTDFTLTISSLQPEDFATYYCQQHYTTPPTFGQGTKVEIK

SEQ ID NO: 84 - protein, 874 aa, Artificial Sequence
  Description of Artificial Sequence: Synthetic polypeptide
  MOD_RES (1)..(1): Ala, Arg, Asn, Asp, Gln, Glu, Gly, His, Leu, Lys, Met, Phe, Thr, Val, or not present
  MOD_RES (6)..(6): Phe, Trp, Tyr or Val
  MOD_RES (9)..(9): Lys or Asp
  MOD_RES (62)..(62): Pro, Asn, Asp, His, Glu, Gly, Ser or Thr
  MOD_RES (93)..(93): Ala, Glu, or Lys
  MOD_RES (187)..(187): Arg, Ile, or Lys
  MOD_RES (270)..(270): Gln, Ala, His, Phe, or Pro
  MOD_RES (301)..(301): Ser or Arg
  MOD_RES (302)..(302): Trp or Lys
  MOD_RES (332)..(332): Ala, Cys, Ser, or Val
  MOD_RES (363)..(363): Val or Arg
  MOD_RES (365)..(365): Leu, Gln, His, Ile, Lys, or Ser
  See specification as filed for detailed description of substitutions and preferred embodiments
XASLPXLQXESVFQSGAHAYRIPALLYLPGQQSLLAFAEQRASKKDEHAELIVLRRGDYDAXTHQVQWQAQEVVAQARLDGHRSMNPCPLYDXQTGTLFLFFIAIPGQVTEQQQLQTRANVTRLCQVTSTDHGRTWSSPRDLTDAAIGPAYREWSTFAVGPGHCLQLHDRARSLVVPAYAYRKLHPXQRPIPSAFCFLSHDHGRTWARGHFVAQDTLECQVAEVETGEQRVVTLNARSHLRARVQAQSTNDGLDFQESQLVKKLVEPPPXGCQGSVISFPSPRSGPGSPAQWLLYTHPTHXXQRADLGAYLNPRPPAPEAWSEPVLLAKGSXAYSDLQSMGTGPDGSPLFGCLYEANDYEEIXFXMFTLKQAFPAEYLPQGGGGSGGGGSDKTHTCPPCPAPELLGGPSVFLFPPKPKDTLMISRTPEVTCVVVDVSHEDPEVKFNWYVDGVEVHNAKTKPREEQYNSTYRVVSVLTVLHQDWLNGKEYKCKVSNKALPAPIEKTISKAKGQPREPQVYTLPPSREEMTKNQVSLTCLVKGFYPSDIAVEWESNGQPENNYKTTPPVLDSDGSFFLYSKLTVDKSRWQQGNVFSCSVMHEALHNHYTQKSLSLSPGKGGGGSGGGGSGGGGSEVQLVESGGGLVQPGGSLRLSCAASGFNIKDTYIHWVRQAPGKGLEWVARIYPTNGYTRYADSVKGRFTISADTSKNTAYLQMNSLRAEDTAVYYCSRWGGDGFYAMDYWGQGTLVTVSSGGGGSGGGGSGGGGSDIQMTQSPSSLSASVGDRVTITCRASQDVNTAVAWYQQKPGKAPKLLIYSASFLYSGVPSRFSGSRSGTDFTLTISSLQPEDFATYYCQQHYTTPPTFGQGTKVEIK

SEQ ID NO: 85 - protein, 874 aa, Artificial Sequence
  Description of Artificial Sequence: Synthetic polypeptide
  MOD_RES (1)..(1): Ala, Arg, Asn, Asp, Gln, Glu, Gly, His, Leu, Lys, Met, Phe, Thr, Val, or not present
  MOD_RES (2)..(2): Ala or Lys
  MOD_RES (4)..(4): Asn or Leu
  MOD_RES (5)..(5): Pro or His
  MOD_RES (6)..(6): Phe, Trp, Tyr or Val
  MOD_RES (9)..(9): Lys or Asp
  MOD_RES (44)..(44): Lys, Arg, or Glu
  MOD_RES (45)..(45): Lys, Ala, Arg, or Glu
  MOD_RES (54)..(54): Leu or Met
  MOD_RES (62)..(62): Pro, Asn, Asp, His, Glu, Gly, Ser or Thr
  MOD_RES (69)..(69): Gln or His
  MOD_RES (78)..(78): Arg or Lys
  MOD_RES (93)..(93): Ala, Glu or Lys
  MOD_RES (107)..(107): Gly or Asp
  MOD_RES (108)..(108): Gln or His
  MOD_RES (112)..(112): Gln, Arg, or Lys
  MOD_RES (125)..(125): Ala, Cys, Ile, Ser, Val, or Leu
  MOD_RES (126)..(126): Gln or Leu
  MOD_RES (150)..(150): Ala or Val
  MOD_RES (164)..(164): Cys or Gly
  MOD_RES (171)..(171): Ala or Gly
  MOD_RES (187)..(187): Arg, Ile, or Lys
  MOD_RES (196)..(196): Ala, Cys, Leu, or Val
  MOD_RES (217)..(217): Leu, Ala, or Val
  MOD_RES (249)..(249): Thr or Ala
  MOD_RES (251)..(251): Asp or Gly
  MOD_RES (257)..(257): Glu or Lys
  MOD_RES (270)..(270): Gln, Ala, His, Phe, or Pro
  MOD_RES (272)..(272): Cys or Val
  MOD_RES (292)..(292): Trp or Arg
  MOD_RES (301)..(301): Ser or Arg
  MOD_RES (302)..(302): Trp or Lys
  MOD_RES (325)..(325): Lys or Val
  MOD_RES (332)..(332): Ala, Cys, Ser, or Val
  MOD_RES (352)..(352): Cys, Leu, or Val
  MOD_RES (363)..(363): Val or Arg
  MOD_RES (365)..(365): Leu, Gln, His, Ile, Lys, or Ser
  See specification as filed for detailed description of substitutions and preferred embodiments
XXSXXXLQXESVFQSGAHAYRIPALLYLPGQQSLLAFAEQRASXXDEHAELIVXRRGDYDAXTHQVQWXAQEVVAQAXLDGHRSMNPCPLYDXQTGTLFLFFIAIPXXVTEXQQLQTRANVTRLXXVTSTDHGRTWSSPRDLTDAAIGPXYREWSTFAVGPGHXLQLHDRXRSLVVPAYAYRKLHPXQRPIPSAFXFLSHDHGRTWARGHFVAQDTXECQVAEVETGEQRVVTLNARSHLRARVQAQSXNXGLDFQXSQLVKKLVEPPPXGXQGSVISFPSPRSGPGSPAQXLLYTHPTHXXQRADLGAYLNPRPPAPEAWSEPXLLAKGSXAYSDLQSMGTGPDGSPLFGXLYEANDYEEIXFXMFTLKQAFPAEYLPQGGGGSGGGGSDKTHTCPPCPAPELLGGPSVFLFPPKPKDTLMISRTPEVTCVVVDVSHEDPEVKFNWYVDGVEVHNAKTKPREEQYNSTYRVVSVLTVLHQDWLNGKEYKCKVSNKALPAPIEKTISKAKGQPREPQVYTLPPSREEMTKNQVSLTCLVKGFYPSDIAVEWESNGQPENNYKTTPPVLDSDGSFFLYSKLTVDKSRWQQGNVFSCSVMHEALHNHYTQKSLSLSPGKGGGGSGGGGSGGGGSEVQLVESGGGLVQPGGSLRLSCAASGFNIKDTYIHWVRQAPGKGLEWVARIYPTNGYTRYADSVKGRFTISADTSKNTAYLQMNSLRAEDTAVYYCSRWGGDGFYAMDYWGQGTLVTVSSGGGGSGGGGSGGGGSDIQMTQSPSSLSASVGDRVTITCRASQDVNTAVAWYQQKPGKAPKLLIYSASFLYSGVPSRFSGSRSGTDFTLTISSLQPEDFATYYCQQHYTTPPTFGQGTKVEIK

SEQ ID NO: 86 - DNA, 642 bp, Artificial Sequence
  Description of Artificial Sequence: Synthetic polynucleotide
gacatccagatgacacagagccctagcagcctgtctgccagcgtgggagacagagtgaccatcacctgtagagccagccaggacgtgaacacagccgtggcttggtatcagcagaagcctggcaaggcccctaagctgctgatctacagcgccagctttctgtactccggcgtgcccagcagattcagcggctctagaagcggcaccgacttcaccctgaccataagcagtctgcagcccgaggacttcgccacctactactgtcagcagcactacaccacacctccaacctttggccagggcaccaaggtggaaatcaagcgtacggtggctgcaccatctgtcttcatcttcccgccatctgatgagcagttgaaatctggaactgcctctgttgtgtgcctgctgaataacttctatcccagagaggccaaagtacagtggaaggtggataacgccctccaatcgggtaactcccaggagagtgtcacagagcaggacagcaaggacagcacctacagcctcagcagcaccctgacgctgagcaaagcagactacgagaaacacaaagtctacgcctgcgaagtcacccatcagggcctgagctcgcccgtcacaaagagcttcaacaggggagagtgt

SEQ ID NO: 87 - DNA, 1350 bp, Artificial Sequence
  Description of Artificial Sequence: Synthetic polynucleotide
gaggtgcagctggttgaatctggcggaggactggttcagcctggcggatctctgagactgtcttgtgccgccagcggcttcaacatcaaggacacctacatccactgggtccgacaggcccctggcaaaggacttgaatgggtcgccagaatctaccccaccaacggctacaccagatacgccgactctgtgaagggcagattcaccatcagcgccgacaccagcaagaacaccgcctacctgcagatgaacagcctgagagccgaggacaccgccgtgtactactgttctagatggggaggcgacggcttctacgccatggattattggggccagggcaccctggtcaccgtttcttctgctagcaccaagggcccatccgtcttccccctggcaccctcctccaagagcacctctgggggcacagcggccctgggctgcctggtcaaggactacttccccgaaccggtgacggtgtcctggaactcaggcgctctgaccagcggcgtgcacaccttcccggctgtcctacagtcctcaggactctactccctcagcagcgtggtgaccgtgccctccagcagcttgggcacccagacctacatctgcaacgtgaatcacaagcccagcaacaccaaggtggacaagaaagttgagcccaaatcttgtgacaaaactcacacatgcccaccgtgcccagcacctgaactcctggggggaccgtcagtcttcctcttccccccaaaacccaaggacaccctcatgatctcccggacccctgaggtcacatgcgtggtggtggacgtgagccacgaagaccctgaggtcaagttcaactggtacgtggacggcgtggaggtgcataatgccaagacaaagccgcgggaggagcagtacaacagcacgtaccgtgtggtcagcgtcctcaccgtcctgcaccaggactggctgaatggcaaggagtacaagtgcaaggtctccaacaaagccctcccagcccccatcgagaaaaccatctccaaagccaaagggcagccccgagaaccacaggtctacaccctgcccccatcccgggaggagatgaccaagaaccaggtcagcctgtactgcctggtcaaaggcttctatcccagcgacatcgccgtggagtgggagagcaatgggcagccggagaacaactacaagaccacgcctcccgtgctggactccgacggctccttcttcctctatagcaagctcaccgtggacaagagcaggtggcagcaggggaacgtcttctcatgctccgtgatgcatgaggctctgcacaaccactacacgcagaagagcctctccctgtctccgggtaaa

SEQ ID NO: 88 - DNA, 1851 bp, Artificial Sequence
  Description of Artificial Sequence: Synthetic polynucleotide
gatgcatctctgccttacctgcagaaagaaagcgtgttccagtctggcgcccacgcctacagaattcccgctctgctgtatctgccaggccagcagtctctgctggctttcgctgaacagcgggccagcaagaaggatgagcacgccgaactgatcgtgctgcggagaggcgattacgacgccggcacacatcaggtgcagtggcaggctcaagaggtggtggctcaggctagactggacggccacagatctatgaacccctgtcctctgtacgatgaacagaccggcacactgtttctgttctttatcgctatccccggccaagtgaccgagcagcagcagctgcagacaagagccaacgtgaccagactgtgtcaagtgacctccaccgaccacggcagaacctggtctagccctagagatctgaccgacgccgccatcggacctgcctatagagagtggtccaccttcgccgttggacctggacactgtctccagctgcacgacagggctagatctctggtggtgcctgcctacgcctatagaaagctgcaccccaaacagcggcctattcctagcgccttctgctttctgagccacgatcacggcaggacatgggccagaggacatttcgtggcccaggacacactggaatgccaggtggccgaagtggaaaccggcgagcagagagtcgtgaccctgaacgccagatctcacctgagagccagagtgcaggcccagagcacaaacgacggcctggatttccaagagagccagctggtcaagaaactggtggaacctcctccacagggctgtcagggaagcgtgatcagctttccatctcctagaagcggccctggctctcctgctcagtggctgctgtatacacaccccacacacagctggcagagagccgatctgggcgcctacctgaatcctagacctcctgctcctgaggcttggagcgaacctgttctgctggccaagggcagcgctgcctacagcgatctgcagtctatgggcacaggccctgatggcagccctctgtttggctgtctgtacgaggccaacgactacgaagagatcgtgttcctgatgttcaccctgaagcaggcctttccagccgagtacctgcctcaaggcggaggtggaagtggcggaggcggatccgacaaaactcacacatgcccaccgtgcccagcacctgaactcctggggggaccgtcagtcttcctcttccccccaaaacccaaggacaccctcatgatctcccggacccctgaggtcacatgcgtggtggtggacgtgagccacgaagaccctgaggtcaagttcaactggtacgtggacggcgtggaggtgcataatgccaagacaaagccgcgggaggagcagtacaacagcacgtaccgtgtggtcagcgtcctcaccgtcctgcaccaggactggctgaatggcaaggagtacaagtgcaaggtctccaacaaagccctcccagcccccatcgagaaaaccatctccaaagccaaagggcagccccgagaaccacaggtctacaccctgcccccatcccgggaggagatgaccaagaaccaggtcagcctgacctgcctggtcaaaggcttctatcccagcgacatcgccgtggagtgggagagcaatgggcagccggagaacaactacaagaccacgcctcccgtgctggactccgacggctccttcttcctcactagcaagctcaccgtggacaagagcaggtggcagcaggggaacgtcttctcatgctccgtgatgcatgaggctctgcacaaccactacacgcagaagagcctctccctgtctccgggtaaa

SEQ ID NO: 89 - DNA, 1140 bp, Artificial Sequence
  Description of Artificial Sequence: Synthetic polynucleotide
gatgcatctctgccttacctgcagaaagaaagcgtgttccagtctggcgcccacgcctacagaattcccgctctgctgtatctgccaggccagcagtctctgctggctttcgctgaacagcgggccagcaagaaggatgagcacgccgaactgatcgtgctgcggagaggcgattacgacgccggcacacatcaggtgcagtggcaggctcaagaggtggtggctcaggctagactggacggccacagatctatgaacccctgtcctctgtacgatgaacagaccggcacactgtttctgttctttatcgctatccccggccaagtgaccgagcagcagcagctgcagacaagagccaacgtgaccagactgtgtcaagtgacctccaccgaccacggcagaacctggtctagccctagagatctgaccgacgccgccatcggacctgcctatagagagtggtccaccttcgccgttggacctggacactgtctccagctgcacgacagggctagatctctggtggtgcctgcctacgcctatagaaagctgcaccccaaacagcggcctattcctagcgccttctgctttctgagccacgatcacggcaggacatgggccagaggacatttcgtggcccaggacacactggaatgccaggtggccgaagtggaaaccggcgagcagagagtcgtgaccctgaacgccagatctcacctgagagccagagtgcaggcccagagcacaaacgacggcctggatttccaagagagccagctggtcaagaaactggtggaacctcctccacagggctgtcagggaagcgtgatcagctttccatctcctagaagcggccctggctctcctgctcagtggctgctgtatacacaccccacacacagctggcagagagccgatctgggcgcctacctgaatcctagacctcctgctcctgaggcttggagcgaacctgttctgctggccaagggcagcgctgcctacagcgatctgcagtctatgggcacaggccctgatggcagccctctgtttggctgtctgtacgaggccaacgactacgaagagatcgtgttcctgatgttcaccctgaagcaggcctttccagccgagtacctgcctcaa

SEQ ID NO: 90 - protein, 618 aa, Artificial Sequence
  Description of Artificial Sequence: Synthetic polypeptide
TVEKSVVFKAEGEHFTDQKGNTIVGSGSGGTTKYFRIPAMCTTSKGTIVVFADARHNTASDQSFIDTAAARSTDGGKTWNKKIAIYNDRVNSKLSRVMDPTCIVANIQGRETILVMVGKWNNNDKTWGAYRDKAPDTDWDLVLYKSTDDGVTFSKVETNIHDIVTKNGTISAMLGGVGSGLQLNDGKLVFPVQMVRTKNITTVLNTSFIYSTDGITWSLPSGYCEGFGSENNIIEFNASLVNNIRNSGLRRSFETKDFGKTWTEFPPMDKKVDNRNHGVQGSTITIPSGNKLVAAHSSAQNKNNDYTRSDISLYAHNLYSGEVKLIDDFYPKVGNASGAGYSCLSYRKNVDKETLYVVYEANGSIEFQDLSRHLPVIKSYNGGGGSGGGGSDKTHTCPPCPAPELLGGPSVFLFPPKPKDTLMISRTPEVTCVVVDVSHEDPEVKFNWYVDGVEVHNAKTKPREEQYNSTYRVVSVLTVLHQDWLNGKEYKCKVSNKALPAPIEKTISKAKGQPREPQVYTLPPSREEMTKNQVSLTCLVKGFYPSDIAVEWESNGQPENNYKTTPPVLDSDGSFFLTSKLTVDKSRWQQGNVFSCSVMHEALHNHYTQKSLSLSPGK

SEQ ID NO: 91 - DNA, 1854 bp, Artificial Sequence
  Description of Artificial Sequence: Synthetic polynucleotide
acagtggaaaagtccgtggtgttcaaggccgagggcgagcacttcaccgaccagaaaggcaataccatcgtcggctctggcagcggcggcaccaccaagtactttagaatccccgccatgtgcaccaccagcaagggcaccattgtggtgttcgccgacgccagacacaacaccgccagcgatcagagcttcatcgataccgctgccgccagatctaccgatggcggcaagacctggaacaagaagatcgccatctacaacgaccgcgtgaacagcaagctgagcagagtgatggaccctacctgcatcgtggccaacatccagggcagagaaaccatcctggtcatggtcggaaagtggaacaacaacgataagacctggggcgcctacagagacaaggcccctgataccgattgggacctcgtgctgtacaagagcaccgatgacggcgtgaccttcagcaaggtggaaacaaacatccacgacatcgtgaccaagaacggcaccatctctgccatgctcggcggcgttggatctggcctgcaactgaatgatggcaagctggtgttccccgtgcagatggtccgaacaaagaatatcaccaccgtgctgaataccagcttcatctacagcaccgacggcatcacatggtccctgcctagcggctactgtgaaggctttggcagcgagaacaacatcatcgagttcaacgccagcctggtcaacaacatccggaacagcggcctgcggagaagcttcgagacaaaggacttcggaaagacgtggaccgagtttcctccaatggacaagaaggtggacaaccggaaccacggcgtgcagggcagcacaatcacaatccctagcggcaacaaactggtggccgctcactctagcgcccagaacaagaacaacgactacaccagaagcgacatcagcctgtacgcccacaacctgtacagcggcgaagtgaagctgatcgacgacttctaccccaaagtgggcaatgccagcggagccggctacagctgtctgagctaccggaaaaatgtggacaaagaaaccctgtacgtggtgtacgaggccaacggcagcatcgagtttcaggacctgagcagacatctgcccgtgatcaagagctacaacggcggaggtggaagtggcggaggcggatccgacaaaactcacacatgcccaccgtgcccagcacctgaactcctggggggaccgtcagtcttcctcttccccccaaaacccaaggacaccctcatgatctcccggacccctgaggtcacatgcgtggtggtggacgtgagccacgaagaccctgaggtcaagttcaactggtacgtggacggcgtggaggtgcataatgccaagacaaagccgcgggaggagcagtacaacagcacgtaccgtgtggtcagcgtcctcaccgtcctgcaccaggactggctgaatggcaaggagtacaagtgcaaggtctccaacaaagccctcccagcccccatcgagaaaaccatctccaaagccaaagggcagccccgagaaccacaggtctacaccctgcccccatcccgggaggagatgaccaagaaccaggtcagcctgacctgcctggtcaaaggcttctatcccagcgacatcgccgtggagtgggagagcaatgggcagccggagaacaactacaagaccacgcctcccgtgctggactccgacggctccttcttcctcactagcaagctcaccgtggacaagagcaggtggcagcaggggaacgtcttctcatgctccgtgatgcatgaggctctgcacaaccactacacgcagaagagcctctccctgtctccgggtaaa

SEQ ID NO: 92 - protein, 846 aa, Artificial Sequence
  Description of Artificial Sequence: Synthetic polypeptide
EVQLVESGGGLVQPGGSLRLSCAASGFNIKDTYIHWVRQAPGKGLEWVARIYPTNGYTRYADSVKGRFTISADTSKNTAYLQMNSLRAEDTAVYYCSRWGGDGFYAMDYWGQGTLVTVSSASTKGPSVFPLAPSSKSTSGGTAALGCLVKDYFPEPVTVSWNSGALTSGVHTFPAVLQSSGLYSLSSVVTVPSSSLGTQTYICNVNHKPSNTKVDKKVEPKSCDKTHTCPPCPAPELLGGPSVFLFPPKPKDTLMISRTPEVTCVVVDVSHEDPEVKFNWYVDGVEVHNAKTKPREEQYNSTYRVVSVLTVLHQDWLNGKEYKCKVSNKALPAPIEKTISKAKGQPREPQVYTLPPSREEMTKNQVSLTCLVKGFYPSDIAVEWESNGQPENNYKTTPPVLDSDGSFFLYSKLTVDKSRWQQGNVFSCSVMHEALHNHYTQKSLSLSPGKGGGGSGGGGSGGGGSTVEKSVVFKAEGEHFTDQKGNTIVGSGSGGTTKYFRIPAMCTTSKGTIVVFADARHNTASDQSFIDTAAARSTDGGKTWNKKIAIYNDRVNSKLSRVMDPTCIVANIQGRETILVMVGKWNNNDKTWGAYRDKAPDTDWDLVLYKSTDDGVTFSKVETNIHDIVTKNGTISAMLGGVGSGLQLNDGKLVFPVQMVRTKNITTVLNTSFIYSTDGITWSLPSGYCEGFGSENNIIEFNASLVNNIRNSGLRRSFETKDFGKTWTEFPPMDKKVDNRNHGVQGSTITIPSGNKLVAAHSSAQNKNNDYTRSDISLYAHNLYSGEVKLIDDFYPKVGNASGAGYSCLSYRKNVDKETLYVVYEANGSIEFQDLSRHLPVIKSYN

SEQ ID NO: 93 - DNA, 2538 bp, Artificial Sequence
  Description of Artificial Sequence: Synthetic polynucleotide
gaggtgcagctggttgaatctggcggaggactggttcagcctggcggatctctgagactgtcttgtgccgccagcggcttcaacatcaaggacacctacatccactgggtccgacaggcccctggcaaaggacttgaatgggtcgccagaatctaccccaccaacggctacaccagatacgccgactctgtgaagggcagattcaccatcagcgccgacaccagcaagaacaccgcctacctgcagatgaacagcctgagagccgaggacaccgccgtgtactactgttctagatggggaggcgacggcttctacgccatggattattggggccagggcaccctggtcaccgtttcttctgctagcaccaagggcccatccgtcttccccctggcaccctcctccaagagcacctctgggggcacagcggccctgggctgcctggtcaaggactacttccccgaaccggtgacggtgtcctggaactcaggcgctctgaccagcggcgtgcacaccttcccggctgtcctacagtcctcaggactctactccctcagcagcgtggtgaccgtgccctccagcagcttgggcacccagacctacatctgcaacgtgaatcacaagcccagcaacaccaaggtggacaagaaagttgagcccaaatcttgtgacaaaactcacacatgcccaccgtgcccagcacctgaactcctggggggaccgtcagtcttcctcttccccccaaaacccaaggacaccctcatgatctcccggacccctgaggtcacatgcgtggtggtggacgtgagccacgaagaccctgaggtcaagttcaactggtacgtggacggcgtggaggtgcataatgccaagacaaagccgcgggaggagcagtacaacagcacgtaccgtgtggtcagcgtcctcaccgtcctgcaccaggactggctgaatggcaaggagtacaagtgcaaggtctccaacaaagccctcccagcccccatcgagaaaaccatctccaaagccaaagggcagccccgagaaccacaggtctacaccctgcccccatcccgggaggagatgaccaagaaccaggtcagcctgacctgcctggtcaaaggcttctatcccagcgacatcgccgtggagtgggagagcaatgggcagccggagaacaactacaagaccacgcctcccgtgctggactccgacggctccttcttcctctatagcaagctcaccgtggacaagagcaggtggcagcaggggaacgtcttctcatgctccgtgatgcatgaggctctgcacaaccactacacgcagaagagcctctccctgtctccgggtaaaggtggcggaggatctggcggaggtggaagcggcggaggcggatctacagtggaaaagtccgtggtgttcaaggccgagggcgagcacttcaccgaccagaaaggcaataccatcgtcggctctggcagcggcggcaccaccaagtactttagaatccccgccatgtgcaccaccagcaagggcaccattgtggtgttcgccgacgccagacacaacaccgccagcgatcagagcttcatcgataccgctgccgccagaagtacagacggcggcaagacctggaacaagaagatcgccatctacaacgaccgcgtgaacagcaagctgagcagagtgatggaccctacctgcatcgtggccaacatccagggcagagaaaccatcctggtcatggtcggaaagtggaacaacaacgataagacctggggcgcctacagagacaaggcccctgataccgattgggacctcgtgctgtataagagcaccgacgacggcgtgaccttcagcaaggtggaaacaaacatccacgacatcgtgaccaagaacggcaccatctctgccatgctcggcggcgttggatctggcctgcaactgaatgatggcaagctggtgttccccgtgcagatggtccgaacaaagaacatcaccaccgtgctgaataccagcttcatctactccaccgacggcatcacatggtccctgcctagcggctactgtgaaggctttggcagcgagaacaacatcatcgagttcaacgccagcctggtcaacaacatccggaacagcggcctgcggagaagcttcgagacaaaggacttcggaaagacgtggaccgagtttcctccaatggacaagaaggtggacaaccggaaccacggcgtgcagggcagcacaatcacaatccctagcggcaacaaactggtggccgctcactctagcgcccagaacaagaacaacgattacaccagaagcgacatcagcctgtacgcccacaacctgtactccggcgaagtgaagctgatcgacgacttctaccccaaagtgggcaatgccagcggagccggctacagctgtctgagctaccggaaaaatgtggacaaagaaaccctgtacgtggtgtacgaggccaacggcagcatcgagtttcaggacctgagcagacatctgcccgtgatcaagagctacaat

SEQ ID NO: 94 - protein, 875 aa, Artificial Sequence
  Description of Artificial Sequence: Synthetic polypeptide
TVEKSVVFKAEGEHFTDQKGNTIVGSGSGGTTKYFRIPAMCTTSKGTIVVFADARHNTASDQSFIDTAAARSTDGGKTWNKKIAIYNDRVNSKLSRVMDPTCIVANIQGRETILVMVGKWNNNDKTWGAYRDKAPDTDWDLVLYKSTDDGVTFSKVETNIHDIVTKNGTISAMLGGVGSGLQLNDGKLVFPVQMVRTKNITTVLNTSFIYSTDGITWSLPSGYCEGFGSENNIIEFNASLVNNIRNSGLRRSFETKDFGKTWTEFPPMDKKVDNRNHGVQGSTITIPSGNKLVAAHSSAQNKNNDYTRSDISLYAHNLYSGEVKLIDDFYPKVGNASGAGYSCLSYRKNVDKETLYVVYEANGSIEFQDLSRHLPVIKSYNGGGGSGGGGSDKTHTCPPCPAPELLGGPSVFLFPPKPKDTLMISRTPEVTCVVVDVSHEDPEVKFNWYVDGVEVHNAKTKPREEQYNSTYRVVSVLTVLHQDWLNGKEYKCKVSNKALPAPIEKTISKAKGQPREPQVYTLPPSREEMTKNQVSLTCLVKGFYPSDIAVEWESNGQPENNYKTTPPVLDSDGSFFLYSKLTVDKSRWQQGNVFSCSVMHEALHNHYTQKSLSLSPGKGGGGSGGGGSGGGGSEVQLVESGGGLVQPGGSLRLSCAASGFNIKDTYIHWVRQAPGKGLEWVARIYPTNGYTRYADSVKGRFTISADTSKNTAYLQMNSLRAEDTAVYYCSRWGGDGFYAMDYWGQGTLVTVSSGGGGSGGGGSGGGGSDIQMTQSPSSLSASVGDRVTITCRASQDVNTAVAWYQQKPGKAPKLLIYSASFLYSGVPSRFSGSRSGTDFTLTISSLQPEDFATYYCQQHYTTPPTFGQGTKVEIK

SEQ ID NO: 95 - DNA, 2625 bp, Artificial Sequence
  Description of Artificial Sequence: Synthetic polynucleotide
acagtggaaaagtccgtggtgttcaaggccgagggcgagcacttcaccgaccagaaaggcaataccatcgtcggctctggcagcggcggcaccaccaagtactttagaatccccgccatgtgcaccaccagcaagggcaccattgtggtgttcgccgacgccagacacaacaccgccagcgatcagagcttcatcgataccgctgccgccagatctaccgatggcggcaagacctggaacaagaagatcgccatctacaacgaccgcgtgaacagcaagctgagcagagtgatggaccctacctgcatcgtggccaacatccagggcagagaaaccatcctggtcatggtcggaaagtggaacaacaacgataagacctggggcgcctacagagacaaggcccctgataccgattgggacctcgtgctgtacaagagcaccgatgacggcgtgaccttcagcaaggtggaaacaaacatccacgacatcgtgaccaagaacggcaccatctctgccatgctcggcggcgttggatctggcctgcaactgaatgatggcaagctggtgttccccgtgcagatggtccgaacaaagaatatcaccaccgtgctgaataccagcttcatctacagcaccgacggcatcacatggtccctgcctagcggctactgtgaaggctttggcagcgagaacaacatcatcgagttcaacgccagcctggtcaacaacatccggaacagcggcctgcggagaagcttcgagacaaaggacttcggaaagacgtggaccgagtttcctccaatggacaagaaggtggacaaccggaaccacggcgtgcagggcagcacaatcacaatccctagcggcaacaaactggtggccgctcactctagcgcccagaacaagaacaacgactacaccagaagcgacatcagcctgtacgcccacaacctgtacagcggcgaagtgaagctgatcgacgacttctaccccaaagtgggcaatgccagcggagccggctacagctgtctgagctaccggaaaaatgtggacaaagaaaccctgtacgtggtgtacgaggccaacggcagcatcgagtttcaggacctgagcagacatctgcccgtgatcaagagctacaacggcggaggtggaagtggcggaggcggatccgacaaaactcacacatgcccaccgtgcccagcacctgaactcctggggggaccgtcagtcttcctcttccccccaaaacccaaggacaccctcatgatctcccggacccctgaggtcacatgcgtggtggtggacgtgagccacgaagaccctgaggtcaagttcaactggtacgtggacggcgtggaggtgcataatgccaagacaaagccgcgggaggagcagtacaacagcacgtaccgtgtggtcagcgtcctcaccgtcctgcaccaggactggctgaatggcaaggagtacaagtgcaaggtctccaacaaagccctcccagcccccatcgagaaaaccatctccaaagccaaagggcagccccgagaaccacaggtctacaccctgcccccatcccgggaggagatgaccaagaaccaggtcagcctgacctgcctggtcaaaggcttctatcccagcgacatcgccgtggagtgggagagcaatgggcagccggagaacaactacaagaccacgcctcccgtgctggactccgacggctccttcttcctctatagcaagctcaccgtggacaagagcaggtggcagcaggggaacgtcttctcatgctccgtgatgcatgaggctctgcacaaccactacacgcagaagagcctctccctgtctccgggtaaaggaggcggaggatctggcggaggtggaagtggcggaggcggatctgaggtgcagctggttgaatctggcggaggactggttcagcctggcggatctctgagactgtcttgtgccgccagcggcttcaacatcaaggacacctacatccactgggtccgacaggcccctggcaaaggacttgaatgggtcgccagaatctaccccaccaacggctacaccagatacgccgactctgtgaagggcagattcaccatcagcgccgacaccagcaagaacaccgcctacctgcagatgaacagcctgagagccgaggacaccgccgtgtactactgttctagatggggaggcgacggcttctacgccatggattattggggccagggcaccctggtcaccgtttcttctggcggaggaggatctggcggaggcggaagtggcggaggcggatctgacatccagatgacacagagccctagcagcctgtctgccagcgtgggagacagagtgaccatcacctgtagagccagccaggacgtgaacacagccgtggcttggtatcagcagaagcctggcaaggcccctaagctgctgatctacagcgccagctttctgtactccggcgtgcccagcagattcagcggctctagaagcggcaccgacttcaccctgaccataagcagtctgcagcccgaggacttcgccacctactactgtcagcagcactacaccacacctccaacctttggccagggcaccaaggtggaaatcaag

SEQ ID NO: 96 - protein, 618 aa, Artificial Sequence
  Description of Artificial Sequence: Synthetic polypeptide
TVEKSVVFKAEGEHFTDQKGNTIVGSGSGGTTKYFRIPAMCTTSKGTIVVFADARHNTASDQSFIDTAAARSTDGGKTWNKKIAIYNDRVNSKLSRVMVPTCIVANIQGRETILVMVGKWNNNDKTWGAYRDKAPDTDWDLVLYKSTDDGVTFSKVETNIHDIVTKNGTISAMLGGVGSGLQLNDGKLVFPVQMVRTKNITTVLNTSFIYSTDGITWSLPSGYCEGFGSVNNIIEFNASLVNNIRNSGLRRSFETKDFGKTWTEFPPMDKKVDNRNHGVQGSTITIPSGNKLVAAHSSAQNKNNDYTRSDISLYAHNLYSGEVKLIDDFYPKVGNASGAGYSCLSYRKNVDKETLYVVYEANGSIEFQDLSRHLPVIKSYNGGGGSGGGGSDKTHTCPPCPAPELLGGPSVFLFPPKPKDTLMISRTPEVTCVVVDVSHEDPEVKFNWYVDGVEVHNAKTKPREEQYNSTYRVVSVLTVLHQDWLNGKEYKCKVSNKALPAPIEKTISKAKGQPREPQVYTLPPSREEMTKNQVSLTCLVKGFYPSDIAVEWESNGQPENNYKTTPPVLDSDGSFFLTSKLTVDKSRWQQGNVFSCSVMHEALHNHYTQKSLSLSPGK

SEQ ID NO: 97 - DNA, 1854 bp, Artificial Sequence
  Description of Artificial Sequence: Synthetic polynucleotide
acagtggaaaagtccgtggtgttcaaggccgagggcgagcacttcaccgaccagaaaggcaataccatcgtcggctctggcagcggcggcaccaccaagtactttagaatccccgccatgtgcaccaccagcaagggcaccattgtggtgttcgccgacgccagacacaacaccgccagcgatcagagcttcatcgataccgctgccgccagaagtacagacggcggcaagacctggaacaagaagatcgccatctacaacgaccgcgtgaacagcaagctgagcagagtgatggtccctacctgcatcgtggccaacatccagggcagagaaaccatcctggtcatggtcggaaagtggaacaacaacgataagacctggggcgcctacagagacaaggcccctgataccgattgggacctcgtgctgtataagagcaccgacgacggcgtgaccttcagcaaggtggaaacaaacatccacgacatcgtgaccaagaacggcaccatctctgccatgctcggcggcgttggatctggcctgcaactgaatgatggcaagctggtgttccccgtgcagatggtccgaacaaagaacatcaccaccgtgctgaataccagcttcatctactccaccgacggcatcacatggtccctgcctagcggctactgtgaaggctttggcagcgtgaacaacatcatcgagttcaacgccagcctggtcaacaacatccggaacagcggcctgcggagaagcttcgagacaaaggacttcggaaagacgtggaccgagtttcctccaatggacaagaaggtggacaaccggaaccacggcgtgcagggcagcacaatcacaatccctagcggcaacaaactggtggccgctcactctagcgcccagaacaagaacaacgattacaccagaagcgacatcagcctgtacgcccacaacctgtactccggcgaagtgaagctgatcgacgacttctaccccaaagtgggcaatgccagcggagccggctacagctgtctgagctaccggaaaaatgtggacaaagaaaccctgtacgtggtgtacgaggccaacggcagcatcgagtttcaggacctgagcagacatctgcccgtgatcaagagctacaatggcggaggtggaagtggcggaggcggatccgacaaaactcacacatgcccaccgtgcccagcacctgaactcctggggggaccgtcagtcttcctcttccccccaaaacccaaggacaccctcatgatctcccggacccctgaggtcacatgcgtggtggtggacgtgagccacgaagaccctgaggtcaagttcaactggtacgtggacggcgtggaggtgcataatgccaagacaaagccgcgggaggagcagtacaacagcacgtaccgtgtggtcagcgtcctcaccgtcctgcaccaggactggctgaatggcaaggagtacaagtgcaaggtctccaacaaagccctcccagcccccatcgagaaaaccatctccaaagccaaagggcagccccgagaaccacaggtctacaccctgcccccatcccgggaggagatgaccaagaaccaggtcagcctgacctgcctggtcaaaggcttctatcccagcgacatcgccgtggagtgggagagcaatgggcagccggagaacaactacaagaccacgcctcccgtgctggactccgacggctccttcttcctcactagcaagctcaccgtggacaagagcaggtggcagcaggggaacgtcttctcatgctccgtgatgcatgaggctctgcacaaccactacacgcagaagagcctctccctgtctccgggtaaa

SEQ ID NO: 98 - protein, 612 aa, Artificial Sequence
  Description of Artificial Sequence: Synthetic polypeptide
DASLPYLQKESVFQSGAHAYRIPALLYLPGQQSLLAFAEQRASKKDEHAELIVLRRGDYDAGTHQVQWQAQEVVAQARLDGHRSMNPCPLYDEQTGTLFLFFIAIPGQVTEQQQLQTRANVTRLCQVTSTDHGRTWSSPRDLTDAAIGPAYREWSTFAVGPGHCLQLHDRARSLVVPAYAYRKLHPKQRPIPSAFCFLSHDHGRTWARGHFVAQDTLECQVAEVETGEQRVVTLNARSHLRARVQAQSTNDGLDFQESQLVKKLVEPPPQGCQGSVISFPSPRSGPGSPAQWLLYTHPTHSWQRADLGAYLNPRPPAPEAWSEPVLLAKGSAAYSDLQSMGTGPDGSPLFGCLYEANDYEEIVFLMFTLKQAFPAEYLPQEPKSSDKTHTCPPCPAPELLGGPSVFLFPPKPKDTLMISRTPEVTCVVVDVSHEDPEVKFNWYVDGVEVHNAKTKPREEQYNSTYRVVSVLTVLHQDWLNGKEYKCKVSNKALPAPIEKTISKAKGQPREPQVYTLPPSREEMTKNQVSLTCLVKGFYPSDIAVEWESNGQPENNYKTTPPVLDSDGSFFLTSKLTVDKSRWQQGNVFSCSVMHEALHNHYTQKSLSLSPGK

SEQ ID NO: 99 - protein, 612 aa, Artificial Sequence
  Description of Artificial Sequence: Synthetic polypeptide
DASLPYLQDESVFQSGAHAYRIPALLYLPGQQSLLAFAEQRASKKDEHAELIVLRRGDYDAPTHQVQWQAQEVVAQARLDGHRSMNPCPLYDEQTGTLFLFFIAIPGQVTEQQQLQTRANVTRLCQVTSTDHGRTWSSPRDLTDAAIGPAYREWSTFAVGPGHCLQLHDRARSLVVPAYAYRKLHPKQRPIPSAFCFLSHDHGRTWARGHFVAQDTLECQVAEVETGEQRVVTLNARSHLRARVQAQSTNDGLDFQESQLVKKLVEPPPQGCQGSVISFPSPRSGPGSPAQWLLYTHPTHSWQRADLGAYLNPRPPAPEAWSEPVLLAKGSAAYSDLQSMGTGPDGSPLFGCLYEANDYEEIRFIMFTLKQAFPAEYLPQEPKSSDKTHTCPPCPAPELLGGPSVFLFPPKPKDTLMISRTPEVTCVVVDVSHEDPEVKFNWYVDGVEVHNAKTKPREEQYNSTYRVVSVLTVLHQDWLNGKEYKCKVSNKALPAPIEKTISKAKGQPREPQVYTLPPSREEMTKNQVSLTCLVKGFYPSDIAVEWESNGQPENNYKTTPPVLDSDGSFFLTSKLTVDKSRWQQGNVFSCSVMHEALHNHYTQKSLSLSPGK

SEQ ID NO: 100 - protein, 612 aa, Artificial Sequence
  Description of Artificial Sequence: Synthetic polypeptide
DASLPYLQKESVFQSGAHAYRIPALLYLPGQQSLLAFAEQRASKKDEHAELIVLRRGDYDANTHQVQWQAQEVVAQARLDGHRSMNPCPLYDAQTGTLFLFFIAIPGQVTEQQQLQTRANVTRLCQVTSTDHGRTWSSPRDLTDAAIGPAYREWSTFAVGPGHCLQLHDRARSLVVPAYAYRKLHPKQRPIPSAFCFLSHDHGRTWARGHFVAQDTLECQVAEVETGEQRVVTLNARSHLRARVQAQSTNDGLDFQESQLVKKLVEPPPQGCQGSVISFPSPRSGPGSPAQWLLYTHPTHSWQRADLGAYLNPRPPAPEAWSEPVLLAKGSAAYSDLQSMGTGPDGSPLFGCLYEANDYEEIVFLMFTLKQAFPAEYLPQEPKSSDKTHTCPPCPAPELLGGPSVFLFPPKPKDTLMISRTPEVTCVVVDVSHEDPEVKFNWYVDGVEVHNAKTKPREEQYNSTYRVVSVLTVLHQDWLNGKEYKCKVSNKALPAPIEKTISKAKGQPREPQVYTLPPSREEMTKNQVSLTCLVKGFYPSDIAVEWESNGQPENNYKTTPPVLDSDGSFFLTSKLTVDKSRWQQGNVFSCSVMHEALHNHYTQKSLSLSPGK

SEQ ID NO: 101 - protein, 612 aa, Artificial Sequence
  Description of Artificial Sequence: Synthetic polypeptide
DASLPYLQKESVFQSGAHAYRIPALLYLPGQQSLLAFAEQRASKKDEHAELIVLRRGDYDAPTHQVQWQAQEVVAQARLDGHRSMNPCPLYDAQTGTLFLFFIAIPGQVTEQQQLQTRANVTRLCQVTSTDHGRTWSSPRDLTDAAIGPAYREWSTFAVGPGHCLQLHDRARSLVVPAYAYRKLHPKQRPIPSAFCFLSHDHGRTWARGHFVAQDTLECQVAEVETGEQRVVTLNARSHLRARVQAQSTNDGLDFQESQLVKKLVEPPPAGCQGSVISFPSPRSGPGSPAQWLLYTHPTHRKQRADLGAYLNPRPPAPEAWSEPVLLAKGSAAYSDLQSMGTGPDGSPLFGCLYEANDYEEIVFLMFTLKQAFPAEYLPQEPKSSDKTHTCPPCPAPELLGGPSVFLFPPKPKDTLMISRTPEVTCVVVDVSHEDPEVKFNWYVDGVEVHNAKTKPREEQYNSTYRVVSVLTVLHQDWLNGKEYKCKVSNKALPAPIEKTISKAKGQPREPQVYTLPPSREEMTKNQVSLTCLVKGFYPSDIAVEWESNGQPENNYKTTPPVLDSDGSFFLTSKLTVDKSRWQQGNVFSCSVMHEALHNHYTQKSLSLSPGK

SEQ ID NO: 102 - protein, 612 aa, Artificial Sequence
  Description of Artificial Sequence: Synthetic polypeptide
DASLPYLQKESVFQSGAHAYRIPALLYLPGQQSLLAFAEQRASKKDEHAELIVLRRGDYDASTHQVQWQAQEVVAQARLDGHRSMNPCPLYDAQTGTLFLFFIAIPGQVTEQQQLQTRANVTRLCQVTSTDHGRTWSSPRDLTDAAIGPAYREWSTFAVGPGHCLQLHDRARSLVVPAYAYRKLHPKQRPIPSAFCFLSHDHGRTWARGHFVAQDTLECQVAEVETGEQRVVTLNARSHLRARVQAQSTNDGLDFQESQLVKKLVEPPPAGCQGSVISFPSPRSGPGSPAQWLLYTHPTHRKQRADLGAYLNPRPPAPEAWSEPVLLAKGSAAYSDLQSMGTGPDGSPLFGCLYEANDYEEIVFLMFTLKQAFPAEYLPQEPKSSDKTHTCPPCPAPELLGGPSVFLFPPKPKDTLMISRTPEVTCVVVDVSHEDPEVKFNWYVDGVEVHNAKTKPREEQYNSTYRVVSVLTVLHQDWLNGKEYKCKVSNKALPAPIEKTISKAKGQPREPQVYTLPPSREEMTKNQVSLTCLVKGFYPSDIAVEWESNGQPENNYKTTPPVLDSDGSFFLTSKLTVDKSRWQQGNVFSCSVMHEALHNHYTQKSLSLSPGK

SEQ ID NO: 103 - protein, 612 aa, Artificial Sequence
  Description of Artificial Sequence: Synthetic polypeptide
DASLPYLQKESVFQSGAHAYRIPALLYLPGQQSLLAFAEQRASKKDEHAELIVLRRGDYDATTHQVQWQAQEVVAQARLDGHRSMNPCPLYDAQTGTLFLFFIAIPGQVTEQQQLQTRANVTRLCQVTSTDHGRTWSSPRDLTDAAIGPAYREWSTFAVGPGHCLQLHDRARSLVVPAYAYRKLHPKQRPIPSAFCFLSHDHGRTWARGHFVAQDTLECQVAEVETGEQRVVTLNARSHLRARVQAQSTNDGLDFQESQLVKKLVEPPPAGCQGSVISFPSPRSGPGSPAQWLLYTHPTHRKQRADLGAYLNPRPPAPEAWSEPVLLAKGSAAYSDLQSMGTGPDGSPLFGCLYEANDYEEIVFLMFTLKQAFPAEYLPQEPKSSDKTHTCPPCPAPELLGGPSVFLFPPKPKDTLMISRTPEVTCVVVDVSHEDPEVKFNWYVDGVEVHNAKTKPREEQYNSTYRVVSVLTVLHQDWLNGKEYKCKVSNKALPAPIEKTISKAKGQPREPQVYTLPPSREEMTKNQVSLTCLVKGFYPSDIAVEWESNGQPENNYKTTPPVLDSDGSFFLTSKLTVDKSRWQQGNVFSCSVMHEALHNHYTQKSLSLSPGK

SEQ ID NO: 104 - protein, 612 aa, Artificial Sequence
  Description of Artificial Sequence: Synthetic polypeptide
DASLPYLQKESVFQSGAHAYRIPALLYLPGQQSLLAFAEQRASKKDEHAELIVLRRGDYDANTHQVQWQAQEVVAQARLDGHRSMNPCPLYDAQTGTLFLFFIAIPGQVTEQQQLQTRANVTRLCQVTSTDHGRTWSSPRDLTDAAIGPAYREWSTFAVGPGHCLQLHDRARSLVVPAYAYRKLHPKQRPIPSAFCFLSHDHGRTWARGHFVAQDTLECQVAEVETGEQRVVTLNARSHLRARVQAQSTNDGLDFQESQLVKKLVEPPPAGCQGSVISFPSPRSGPGSPAQWLLYTHPTHRKQRADLGAYLNPRPPAPEAWSEPVLLAKGSAAYSDLQSMGTGPDGSPLFGCLYEANDYEEIVFLMFTLKQAFPAEYLPQEPKSSDKTHTCPPCPAPELLGGPSVFLFPPKPKDTLMISRTPEVTCVVVDVSHEDPEVKFNWYVDGVEVHNAKTKPREEQYNSTYRVVSVLTVLHQDWLNGKEYKCKVSNKALPAPIEKTISKAKGQPREPQVYTLPPSREEMTKNQVSLTCLVKGFYPSDIAVEWESNGQPENNYKTTPPVLDSDGSFFLTSKLTVDKSRWQQGNVFSCSVMHEALHNHYTQKSLSLSPGK

SEQ ID NO: 105 - protein, 617 aa, Artificial Sequence
  Description of Artificial Sequence: Synthetic polypeptide
  MOD_RES (1)..(1): Ala, Arg, Asn, Asp, Gln, Glu, Gly, His, Leu, Lys, Met, Phe, Thr, Val, or not present
  MOD_RES (6)..(6): Phe, Trp, Tyr or Val
  MOD_RES (9)..(9): Lys or Asp
  MOD_RES (62)..(62): Pro, Asn, Asp, His, Glu, Gly, Ser or Thr
  MOD_RES (93)..(93): Ala, Glu, or Lys
  MOD_RES (187)..(187): Arg, Ile, or Lys
  MOD_RES (270)..(270): Gln, Ala, His, Phe, or Pro
  MOD_RES (301)..(301): Ser or Arg
  MOD_RES (302)..(302): Trp or Lys
  MOD_RES (332)..(332): Ala, Cys, Ser, or Val
  MOD_RES (363)..(363): Val or Arg
  MOD_RES (365)..(365): Leu, Gln, His, Ile, Lys, or Ser
  MOD_RES (381)..(390): This region may encompass "GGGGSGGGGS" or "EPKSS"
  See specification as filed for detailed description of substitutions and preferred embodiments
XASLPXLQXESVFQSGAHAYRIPALLYLPGQQSLLAFAEQRASKKDEHAELIVLRRGDYDAXTHQVQWQAQEVVAQARLDGHRSMNPCPLYDXQTGTLFLFFIAIPGQVTEQQQLQTRANVTRLCQVTSTDHGRTWSSPRDLTDAAIGPAYREWSTFAVGPGHCLQLHDRARSLVVPAYAYRKLHPXQRPIPSAFCFLSHDHGRTWARGHFVAQDTLECQVAEVETGEQRVVTLNARSHLRARVQAQSTNDGLDFQESQLVKKLVEPPPXGCQGSVISFPSPRSGPGSPAQWLLYTHPTHXXQRADLGAYLNPRPPAPEAWSEPVLLAKGSXAYSDLQSMGTGPDGSPLFGCLYEANDYEEIXFXMFTLKQAFPAEYLPQXXXXXXXXXXDKTHTCPPCPAPELLGGPSVFLFPPKPKDTLMISRTPEVTCVVVDVSHEDPEVKFNWYVDGVEVHNAKTKPREEQYNSTYRVVSVLTVLHQDWLNGKEYKCKVSNKALPAPIEKTISKAKGQPREPQVYTLPPSREEMTKNQVSLTCLVKGFYPSDIAVEWESNGQPENNYKTTPPVLDSDGSFFLTSKLTVDKSRWQQGNVFSCSVMHEALHNHYTQKSLSLSPGK

SEQ ID NO: 106 - protein, 617 aa, Artificial Sequence
  Description of Artificial Sequence: Synthetic polypeptide
  MOD_RES (1)..(1): Ala, Arg, Asn, Asp, Gln, Glu, Gly, His, Leu, Lys, Met, Phe, Thr, Val, or not present
  MOD_RES (2)..(2): Ala or Lys
  MOD_RES (4)..(4): Asn or Leu
  MOD_RES (5)..(5): Pro or His
  MOD_RES (6)..(6): Phe, Trp, Tyr or Val
  MOD_RES (9)..(9): Lys or Asp
  MOD_RES (44)..(44): Lys, Arg, or Glu
  MOD_RES (45)..(45): Lys, Ala, Arg, or Glu
  MOD_RES (54)..(54): Leu or Met
  MOD_RES (62)..(62): Pro, Asn, Asp, His, Glu, Gly, Ser or Thr
  MOD_RES (69)..(69): Gln or His
  MOD_RES (78)..(78): Arg or Lys
  MOD_RES (93)..(93): Ala, Glu or Lys
  MOD_RES (107)..(107): Gly or Asp
  MOD_RES (108)..(108): Gln or His
  MOD_RES (112)..(112): Gln, Arg, or Lys
  MOD_RES (125)..(125): Ala, Cys, Ile, Ser, Val, or Leu
  MOD_RES (126)..(126): Gln or Leu
  MOD_RES (150)..(150): Ala or Val
  MOD_RES (164)..(164): Cys or Gly
  MOD_RES (171)..(171): Ala or Gly
  MOD_RES (187)..(187): Arg, Ile, or Lys
  MOD_RES (196)..(196): Ala, Cys, Leu, or Val
  MOD_RES (217)..(217): Leu, Ala, or Val
  MOD_RES (249)..(249): Thr or Ala
  MOD_RES (251)..(251): Asp or Gly
  MOD_RES (257)..(257): Glu or Lys
  MOD_RES (270)..(270): Gln, Ala, His, Phe, or Pro
  MOD_RES (272)..(272): Cys or Val
  MOD_RES (292)..(292): Trp or Arg
  MOD_RES (301)..(301): Ser or Arg
  MOD_RES (302)..(302): Trp or Lys
  MOD_RES (325)..(325): Lys or Val
  MOD_RES (332)..(332): Ala, Cys, Ser, or Val
  MOD_RES (352)..(352): Cys, Leu, or Val
  MOD_RES (363)..(363): Val or Arg
  MOD_RES (365)..(365): Leu, Gln, His, Ile, Lys, or Ser
  MOD_RES (381)..(390): This region may encompass "GGGGSGGGGS" or "EPKSS"
  See specification as filed for detailed description of substitutions and preferred embodiments
XXSXXXLQXESVFQSGAHAYRIPALLYLPGQQSLLAFAEQRASXXDEHAELIVXRRGDYDAXTHQVQWXAQEVVAQAXLDGHRSMNPCPLYDXQTGTLFLFFIAIPXXVTEXQQLQTRANVTRLXXVTSTDHGRTWSSPRDLTDAAIGPXYREWSTFAVGPGHXLQLHDRXRSLVVPAYAYRKLHPXQRPIPSAFXFLSHDHGRTWARGHFVAQDTXECQVAEVETGEQRVVTLNARSHLRARVQAQSXNXGLDFQXSQLVKKLVEPPPXGXQGSVISFPSPRSGPGSPAQXLLYTHPTHXXQRADLGAYLNPRPPAPEAWSEPXLLAKGSXAYSDLQSMGTGPDGSPLFGXLYEANDYEEIXFXMFTLKQAFPAEYLPQXXXXXXXXXXDKTHTCPPCPAPELLGGPSVFLFPPKPKDTLMISRTPEVTCVVVDVSHEDPEVKFNWYVDGVEVHNAKTKPREEQYNSTYRVVSVLTVLHQDWLNGKEYKCKVSNKALPAPIEKTISKAKGQPREPQVYTLPPSREEMTKNQVSLTCLVKGFYPSDIAVEWESNGQPENNYKTTPPVLDSDGSFFLTSKLTVDKSRWQQGNVFSCSVMHEALHNHYTQKSLSLSPGK

SEQ ID NO: 107 - protein, 10 aa, Artificial Sequence
  Description of Artificial Sequence: Synthetic peptide
GGGGSGGGGS

SEQ ID NO: 108 - protein, 5 aa, Artificial Sequence
  Description of Artificial Sequence: Synthetic peptide
EPKSS

SEQ ID NO: 109 - protein, 232 aa, Artificial Sequence
  Description of Artificial Sequence: Synthetic polypeptide
EPKSCDKTHTCPPCPAPELLGGPSVFLFPPKPKDTLMISRTPEVTCVVVDVSHEDPEVKFNWYVDGVEVHNAKTKPREEQYNSTYRVVSVLTVLHQDWLNGKEYKCKVSNKALPAPIEKTISKAKGQPREPQVYTLPPSREEMTKNQVSLTCLVKGFYPSDIAVEWESNGQPENNYKTTPPVLDSDGSFFLTSKLTVDKSRWQQGNVFSCSVMHEALHNHYTQKSLSLSPGK

SEQ ID NO: 110 - protein, 227 aa, Artificial Sequence
  Description of Artificial Sequence: Synthetic polypeptide
DKTHTCPPCPAPELLGGPSVFLFPPKPKDTLMISRTPEVTCVVVDVSHEDPEVKFNWYVDGVEVHNAKTKPREEQYNSTYRVVSVLTVLHQDWLNGKEYKCKVSNKALPAPIEKTISKAKGQPREPQVYTLPPSREEMTKNQVSLYCLVKGFYPSDIAVEWESNGQPENNYKTTPPVLDSDGSFFLYSKLTVDKSRWQQGNVFSCSVMHEALHNHYTQKSLSLSPGK

SEQ ID NO: 111 - protein, 380 aa, Artificial Sequence
  Description of Artificial Sequence: Synthetic polypeptide
DASLPYLQKESVFQSGAHAYRIPALLYLPGQQSLLAFAEQRASKKDEHAELIVLRRGDYDAGTHQVQWQAQEVVAQARLDGHRSMNPCPLYDEQTGTLFLFFIAIPGQVTEQQQLQTRANVTRLCQVTSTDHGRTWSSPRDLTDAAIGPAYREWSTFAVGPGHCLQLHDRARSLVVPAYAYRKLHPKQRPIPSAFCFLSHDHGRTWARGHFVAQDTLECQVAEVETGEQRVVTLNARSHLRARVQAQSTNDGLDFQESQLVKKLVEPPPQGCQGSVISFPSPRSGPGSPAQWLLYTHPTHARQRADLGAYLNPRPPAPEAWSEPVLLAKGSAAYSDLQSMGTGPDGSPLFGCLYEANDYEEIVFLMFTLKQAFPAEYLPQ

SEQ ID NO: 112 - protein, 617 aa, Artificial Sequence
  Description of Artificial Sequence: Synthetic polypeptide
DASLPYLQKESVFQSGAHAYRIPALLYLPGQQSLLAFAEQRASKKDEHAELIVLRRGDYDAGTHQVQWQAQEVVAQARLDGHRSMNPCPLYDEQTGTLFLFFIAIPGQVTEQQQLQTRANVTRLCQVTSTDHGRTWSSPRDLTDAAIGPAYREWSTFAVGPGHCLQLHDRARSLVVPAYAYRKLHPKQRPIPSAFCFLSHDHGRTWARGHFVAQDTLECQVAEVETGEQRVVTLNARSHLRARVQAQSTNDGLDFQESQLVKKLVEPPPQGCQGSVISFPSPRSGPGSPAQWLLYTHPTHARQRADLGAYLNPRPPAPEAWSEPVLLAKGSAAYSDLQSMGTGPDGSPLFGCLYEANDYEEIVFLMFTLKQAFPAEYLPQGGGGSGGGGSDKTHTCPPCPAPELLGGPSVFLFPPKPKDTLMISRTPEVTCVVVDVSHEDPEVKFNWYVDGVEVHNAKTKPREEQYNSTYRVVSVLTVLHQDWLNGKEYKCKVSNKALPAPIEKTISKAKGQPREPQVYTLPPSREEMTKNQVSLTCLVKGFYPSDIAVEWESNGQPENNYKTTPPVLDSDGSFFLTSKLTVDKSRWQQGNVFSCSVMHEALHNHYTQKSLSLSPGK

SEQ ID NO: 113 - protein, 612 aa, Artificial Sequence
  Description of Artificial Sequence: Synthetic polypeptide
DASLPYLQKESVFQSGAHAYRIPALLYLPGQQSLLAFAEQRASKKDEHAELIVLRRGDYDAGTHQVQWQAQEVVAQARLDGHRSMNPCPLYDEQTGTLFLFFIAIPGQVTEQQQLQTRANVTRLCQVTSTDHGRTWSSPRDLTDAAIGPAYREWSTFAVGPGHCLQLHDRARSLVVPAYAYRKLHPKQRPIPSAFCFLSHDHGRTWARGHFVAQDTLECQVAEVETGEQRVVTLNARSHLRARVQAQSTNDGLDFQESQLVKKLVEPPPQGCQGSVISFPSPRSGPGSPAQWLLYTHPTHARQRADLGAYLNPRPPAPEAWSEPVLLAKGSAAYSDLQSMGTGPDGSPLFGCLYEANDYEEIVFLMFTLKQAFPAEYLPQEPKSSDKTHTCPPCPAPELLGGPSVFLFPPKPKDTLMISRTPEVTCVVVDVSHEDPEVKFNWYVDGVEVHNAKTKPREEQYNSTYRVVSVLTVLHQDWLNGKEYKCKVSNKALPAPIEKTISKAKGQPREPQVYTLPPSREEMTKNQVSLTCLVKGFYPSDIAVEWESNGQPENNYKTTPPVLDSDGSFFLTSKLTVDKSRWQQGNVFSCSVMHEALHNHYTQKSLSLSPGK

SEQ ID NO: 114 - protein, 380 aa, Artificial Sequence
  Description of Artificial Sequence: Synthetic polypeptide
DASLPYLQKESVFQSGAHAYRIPALLYLPGQQSLLAFAEQRASKKDEHAELIVLRRGDYDAGTHQVQWQAQEVVAQARLDGHRSMNPCPLYDEQTGTLFLFFIAIPGQVTEQQQLQTRANVTRLCYVTSTDHGRTWSSPRDLTDAAIGPAYREWSTFAVGPGHCLQLHDRARSLVVPAYAYRKLHPKQRPIPSAFCFLSHDHGRTWARGHFVAQDTLECQVAEVETGEQRVVTLNARSHLRARVQAQSTNDGLDFQESQLVKKLVEPPPTGCQGSVISFPSPRSGPGSPAQWLLYTHPTHSWQRADLGAYLNPRPPAPEAWSEPVLLAKGSAAYSDLQSMGTGPDGSPLFGCLYEANDYEEIVFLMFTLKQAFPAEYLPQ

SEQ ID NO: 115 - protein, 617 aa, Artificial Sequence
  Description of Artificial Sequence: Synthetic polypeptide
DASLPYLQKESVFQSGAHAYRIPALLYLPGQQSLLAFAEQRASKKDEHAELIVLRRGDYDAGTHQVQWQAQEVVAQARLDGHRSMNPCPLYDEQTGTLFLFFIAIPGQVTEQQQLQTRANVTRLCYVTSTDHGRTWSSPRDLTDAAIGPAYREWSTFAVGPGHCLQLHDRARSLVVPAYAYRKLHPKQRPIPSAFCFLSHDHGRTWARGHFVAQDTLECQVAEVETGEQRVVTLNARSHLRARVQAQSTNDGLDFQESQLVKKLVEPPPTGCQGSVISFPSPRSGPGSPAQWLLYTHPTHSWQRADLGAYLNPRPPAPEAWSEPVLLAKGSAAYSDLQSMGTGPDGSPLFGCLYEANDYEEIVFLMFTLKQAFPAEYLPQGGGGSGGGGSDKTHTCPPCPAPELLGGPSVFLFPPKPKDTLMISRTPEVTCVVVDVSHEDPEVKFNWYVDGVEVHNAKTKPREEQYNSTYRVVSVLTVLHQDWLNGKEYKCKVSNKALPAPIEKTISKAKGQPREPQVYTLPPSREEMTKNQVSLTCLVKGFYPSDIAVEWESNGQPENNYKTTPPVLDSDGSFFLTSKLTVDKSRWQQGNVFSCSVMHEALHNHYTQKSLSLSPGK

SEQ ID NO: 116 - protein, 612 aa, Artificial Sequence
  Description of Artificial Sequence: Synthetic polypeptide
DASLPYLQKESVFQSGAHAYRIPALLYLPGQQSLLAFAEQRASKKDEHAELIVLRRGDYDAGTHQVQWQAQEVVAQARLDGHRSMNPCPLYDEQTGTLFLFFIAIPGQVTEQQQLQTRANVTRLCYVTSTDHGRTWSSPRDLTDAAIGPAYREWSTFAVGPGHCLQLHDRARSLVVPAYAYRKLHPKQRPIPSAFCFLSHDHGRTWARGHFVAQDTLECQVAEVETGEQRVVTLNARSHLRARVQAQSTNDGLDFQESQLVKKLVEPPPTGCQGSVISFPSPRSGPGSPAQWLLYTHPTHSWQRADLGAYLNPRPPAPEAWSEPVLLAKGSAAYSDLQSMGTGPDGSPLFGCLYEANDYEEIVFLMFTLKQAFPAEYLPQEPKSSDKTHTCPPCPAPELLGGPSVFLFPPKPKDTLMISRTPEVTCVVVDVSHEDPEVKFNWYVDGVEVHNAKTKPREEQYNSTYRVVSVLTVLHQDWLNGKEYKCKVSNKALPAPIEKTISKAKGQPREPQVYTLPPSREEMTKNQVSLTCLVKGFYPSDIAVEWESNGQPENNYKTTPPVLDSDGSFFLTSKLTVDKSRWQQGNVFSCSVMHEALHNHYTQKSLSLSPGK

SEQ ID NO: 117 - protein, 380 aa, Artificial Sequence
  Description of Artificial Sequence: Synthetic polypeptide
DASLPYLQKESVFQSGAHAYRIPALLYLPGQQSLLAFAEQRASKKDEHAELIVLRRGDYDAGTHQVQWQAQEVVAQARLDGHRSMNPCPLYDEQTGTLFLFFIAIPGQVTEQQQLQTRANVTRLCYVTSTDHGRTWSSPRDLTDAAIGPAYREWSTFAVGPGHCLQLHDRARSLVVPAYAYRKLHPKQRPIPSAFCFLSHDHGRTWARGHFVAQDTLECQVAEVETGEQRVVTLNARSHLRFRVQAQSTNDGLDFQESQLVKKLVEPPPTGCQGSVISFPSPRSGPGSPAQWLLYTHPTHSWQRADLGAYLNPRPPAPEAWSEPVLLAKGSAAYSDLQSMGTGPDGSPLFGCLYEANDYEEIVFLMFTLKQAFPAEYLPQ

SEQ ID NO: 118 - protein, 617 aa, Artificial Sequence
  Description of Artificial Sequence: Synthetic polypeptide
DASLPYLQKESVFQSGAHAYRIPALLYLPGQQSLLAFAEQRASKKDEHAELIVLRRGDYDAGTHQVQWQAQEVVAQARLDGHRSMNPCPLYDEQTGTLFLFFIAIPGQVTEQQQLQTRANVTRLCYVTSTDHGRTWSSPRDLTDAAIGPAYREWSTFAVGPGHCLQLHDRARSLVVPAYAYRKLHPKQRPIPSAFCFLSHDHGRTWARGHFVAQDTLECQVAEVETGEQRVVTLNARSHLRFRVQAQSTNDGLDFQESQLVKKLVEPPPTGCQGSVISFPSPRSGPGSPAQWLLYTHPTHSWQRADLGAYLNPRPPAPEAWSEPVLLAKGSAAYSDLQSMGTGPDGSPLFGCLYEANDYEEIVFLMFTLKQAFPAEYLPQGGGGSGGGGSDKTHTCPPCPAPELLGGPSVFLFPPKPKDTLMISRTPEVTCVVVDVSHEDPEVKFNWYVDGVEVHNAKTKPREEQYNSTYRVVSVLTVLHQDWLNGKEYKCKVSNKALPAPIEKTISKAKGQPREPQVYTLPPSREEMTKNQVSLTCLVKGFYPSDIAVEWESNGQPENNYKTTPPVLDSDGSFFLTSKLTVDKSRWQQGNVFSCSVMHEALHNHYTQKSLSLSPGK

SEQ ID NO: 119 - protein, 612 aa, Artificial Sequence
  Description of Artificial Sequence: Synthetic polypeptide
DASLPYLQKESVFQSGAHAYRIPALLYLPGQQSLLAFAEQRASKKDEHAELIVLRRGDYDAGTHQVQWQAQEVVAQARLDGHRSMNPCPLYDEQTGTLFLFFIAIPGQVTEQQQLQTRANVTRLCYVTSTDHGRTWSSPRDLTDAAIGPAYREWSTFAVGPGHCLQLHDRARSLVVPAYAYRKLHPKQRPIPSAFCFLSHDHGRTWARGHFVAQDTLECQVAEVETGEQRVVTLNARSHLRFRVQAQSTNDGLDFQESQLVKKLVEPPPTGCQGSVISFPSPRSGPGSPAQWLLYTHPTHSWQRADLGAYLNPRPPAPEAWSEPVLLAKGSAAYSDLQSMGTGPDGSPLFGCLYEANDYEEIVFLMFTLKQAFPAEYLPQEPKSSDKTHTCPPCPAPELLGGPSVFLFPPKPKDTLMISRTPEVTCVVVDVSHEDPEVKFNWYVDGVEVHNAKTKPREEQYNSTYRVVSVLTVLHQDWLNGKEYKCKVSNKALPAPIEKTISKAKGQPREPQVYTLPPSREEMTKNQVSLTCLVKGFYPSDIAVEWESNGQPENNYKTTPPVLDSDGSFFLTSKLTVDKSRWQQGNVFSCSVMHEALHNHYTQKSLSLSPGK

SEQ ID NO: 120 - protein, 617 aa, Artificial Sequence
  Description of Artificial Sequence: Synthetic polypeptide
  MOD_RES (1)..(1): Ala, Arg, Asn, Asp, Gln, Glu, Gly, His, Leu, Lys, Met, Phe, Thr, Val, or not present
  MOD_RES (6)..(6): Phe, Trp, Tyr or Val
  MOD_RES (9)..(9): Lys or Asp
  MOD_RES (62)..(62): Pro, Asn, Asp, His, Glu, Gly, Ser or Thr
  MOD_RES (93)..(93): Ala, Glu, or Lys
  MOD_RES (126)..(126): Gln, Leu, Glu, Phe, His, Ile, Leu, or Tyr
  MOD_RES (187)..(187): Arg, Ile, or Lys
  MOD_RES (242)..(242): Ala, Cys, Phe, Gly, His, Ile, Lys, Leu, Met, Asn, Gln, Arg, Ser, Val, Trp, or Tyr
  MOD_RES (270)..(270): Gln, Ala, His, Phe, Pro, Ser, or Thr
  MOD_RES (301)..(301): Ser, Arg, Ala, Asp, Glu, Phe, Gly, His, Ile, Lys, Leu, Met, Asn, Pro, Gln, Thr, Val, Trp, or Tyr
  MOD_RES (302)..(302): Trp, Lys, Ala, Asp, Glu, Phe, Gly, His, Ile, Lys, Leu, Met, Asn, Pro, Gln, Arg, Ser, Thr, Val, or Tyr
  MOD_RES (332)..(332): Ala, Cys, Ser, or Val
  MOD_RES (363)..(363): Val or Arg
  MOD_RES (365)..(365): Leu, Gln, His, Ile, Lys, or Ser
  MOD_RES (381)..(390): This region may encompass "GGGGS", "GGGGSGGGGS" or "EPKSS"
  See specification as filed for detailed description of substitutions and preferred embodiments
XASLPXLQXESVFQSGAHAYRIPALLYLPGQQSLLAFAEQRASKKDEHAELIVLRRGDYDAXTHQVQWQAQEVVAQARLDGHRSMNPCPLYDXQTGTLFLFFIAIPGQVTEQQQLQTRANVTRLCXVTSTDHGRTWSSPRDLTDAAIGPAYREWSTFAVGPGHCLQLHDRARSLVVPAYAYRKLHPXQRPIPSAFCFLSHDHGRTWARGHFVAQDTLECQVAEVETGEQRVVTLNARSHLRXRVQAQSTNDGLDFQESQLVKKLVEPPPXGCQGSVISFPSPRSGPGSPAQWLLYTHPTHXXQRADLGAYLNPRPPAPEAWSEPVLLAKGSXAYSDLQSMGTGPDGSPLFGCLYEANDYEEIXFXMFTLKQAFPAEYLPQXXXXXXXXXXDKTHTCPPCPAPELLGGPSVFLFPPKPKDTLMISRTPEVTCVVVDVSHEDPEVKFNWYVDGVEVHNAKTKPREEQYNSTYRVVSVLTVLHQDWLNGKEYKCKVSNKALPAPIEKTISKAKGQPREPQVYTLPPSREEMTKNQVSLTCLVKGFYPSDIAVEWESNGQPENNYKTTPPVLDSDGSFFLTSKLTVDKSRWQQGNVFSCSVMHEALHNHYTQKSLSLSPGK

SEQ ID NO: 121 - protein, 617 aa, Artificial Sequence
  Description of Artificial Sequence: Synthetic polypeptide
  MOD_RES (1)..(1): Ala, Arg, Asn, Asp, Gln, Glu, Gly, His, Leu, Lys, Met, Phe, Thr, Val, or not present
  MOD_RES (2)..(2): Ala or Lys
  MOD_RES (4)..(4): Asn or Leu
  MOD_RES (5)..(5): Pro or His
  MOD_RES (6)..(6): Phe, Trp, Tyr or Val
  MOD_RES (9)..(9): Lys or Asp
  MOD_RES (44)..(44): Lys, Arg, or Glu
  MOD_RES (45)..(45): Lys, Ala, Arg, or Glu
  MOD_RES (54)..(54): Leu or Met
  MOD_RES (62)..(62): Pro, Asn, Asp, His, Glu, Gly, Ser or Thr
  MOD_RES (69)..(69): Gln or His
  MOD_RES (78)..(78): Arg or Lys
  MOD_RES (80)..(80): Asp or Pro
  MOD_RES (93)..(93): Ala, Glu or Lys
  MOD_RES (107)..(107): Gly or Asp
  MOD_RES (108)..(108): Gln or His
  MOD_RES (112)..(112): Gln, Arg, or Lys
  MOD_RES (125)..(125): Ala, Cys, Ile, Ser, Val, or Leu
  MOD_RES (126)..(126): Gln, Leu, Glu, Phe, His, Ile, Leu, or Tyr
  MOD_RES (150)..(150): Ala or Val
  MOD_RES (164)..(164): Cys or Gly
  MOD_RES (170)..(170): Arg or Pro
  MOD_RES (171)..(171): Ala or Gly
  MOD_RES (187)..(187): Arg, Ile, or Lys
  MOD_RES (188)..(188): Gln or Pro
  MOD_RES (189)..(189): Arg or Pro
  MOD_RES (196)..(196): Ala, Cys, Leu, or Val
  MOD_RES (213)..(213): Ala, Cys, Asn, Ser, or Thr
  MOD_RES (217)..(217): Leu, Ala, or Val
  MOD_RES (225)..(225): Glu or Pro
  MOD_RES (239)..(239): His or Pro
  MOD_RES (240)..(240): Leu, Asp, Asn, or Tyr
  MOD_RES (241)..(241): Arg, Ala, Asp, Leu, Gln, or Tyr
  MOD_RES (242)..(242): Ala, Cys, Phe, Gly, His, Ile, Lys, Leu, Met, Asn, Gln, Arg, Ser, Val, Trp, or Tyr
  MOD_RES (244)..(244): Val, Ile, or Lys
  MOD_RES (249)..(249): Thr or Ala
  MOD_RES (251)..(251): Asp or Gly
  MOD_RES (257)..(257): Glu, Lys, or Pro
  MOD_RES (258)..(258): Ser or Cys
  MOD_RES (260)..(260): Leu, Asp, Phe, Gln, or Thr
  MOD_RES (265)..(265): Val or Phe
  MOD_RES (270)..(270): Gln, Ala, His, Phe, Pro, Ser, or Thr
  MOD_RES (272)..(272): Cys or Val
  MOD_RES (292)..(292): Trp or Arg
  MOD_RES (301)..(301): Ser, Arg, Ala, Asp, Glu, Phe, Gly, His, Ile, Lys, Leu, Met, Asn, Pro, Gln, Thr, Val, Trp, or Tyr
  MOD_RES (302)..(302): Trp, Lys, Ala, Asp, Glu, Phe, Gly, His, Ile, Lys, Leu, Met, Asn, Pro, Gln, Arg, Ser, Thr, Val, or Tyr
  MOD_RES (325)..(325): Lys or Val
  MOD_RES (332)..(332): Ala, Cys, Ser, or Val
  MOD_RES (352)..(352): Cys, Leu, or Val
  MOD_RES (363)..(363): Val or Arg
  MOD_RES (365)..(365): Leu, Gln, His, Ile, Lys, or Ser
  MOD_RES (381)..(390): This region may encompass "GGGGS", "GGGGSGGGGS" or "EPKSS"
  See specification as filed for detailed description of substitutions and preferred embodiments
XXSXXXLQXESVFQSGAHAYRIPALLYLPGQQSLLAFAEQRASXXDEHAELIVXRRGDYDAXTHQVQWXAQEVVAQAXLXGHRSMNPCPLYDXQTGTLFLFFIAIPXXVTEXQQLQTRANVTRLXXVTSTDHGRTWSSPRDLTDAAIGPXYREWSTFAVGPGHXLQLHDXXRSLVVPAYAYRKLHPXXXPIPSAFXFLSHDHGRTWARGHFVXQDTXECQVAEVXTGEQRVVTLNARSXXXXRXQAQSXNXGLDFQXXQXVKKLXEPPPXGXQGSVISFPSPRSGPGSPAQXLLYTHPTHXXQRADLGAYLNPRPPAPEAWSEPXLLAKGSXAYSDLQSMGTGPDGSPLFGXLYEANDYEEIXFXMFTLKQAFPAEYLPQXXXXXXXXXXDKTHTCPPCPAPELLGGPSVFLFPPKPKDTLMISRTPEVTCVVVDVSHEDPEVKFNWYVDGVEVHNAKTKPREEQYNSTYRVVSVLTVLHQDWLNGKEYKCKVSNKALPAPIEKTISKAKGQPREPQVYTLPPSREEMTKNQVSLTCLVKGFYPSDIAVEWESNGQPENNYKTTPPVLDSDGSFFLTSKLTVDKSRWQQGNVFSCSVMHEALHNHYTQKSLSLSPGK

SEQ ID NO: 122 - protein, 874 aa, Artificial Sequence
  Description of Artificial Sequence: Synthetic polypeptide
DASLPYLQKESVFQSGAHAYRIPALLYLPGQQSLLAFAEQRASKKDEHAELIVLRRGDYDAGTHQVQWQAQEVVAQARLDGHRSMNPCPLYDEQTGTLFLFFIAIPGQVTEQQQLQTRANVTRLCQVTSTDHGRTWSSPRDLTDAAIGPAYREWSTFAVGPGHCLQLHDRARSLVVPAYAYRKLHPKQRPIPSAFCFLSHDHGRTWARGHFVAQDTLECQVAEVETGEQRVVTLNARSHLRARVQAQSTNDGLDFQESQLVKKLVEPPPQGCQGSVISFPSPRSGPGSPAQWLLYTHPTHARQRADLGAYLNPRPPAPEAWSEPVLLAKGSAAYSDLQSMGTGPDGSPLFGCLYEANDYEEIVFLMFTLKQAFPAEYLPQGGGGSGGGGSDKTHTCPPCPAPELLGGPSVFLFPPKPKDTLMISRTPEVTCVVVDVSHEDPEVKFNWYVDGVEVHNAKTKPREEQYNSTYRVVSVLTVLHQDWLNGKEYKCKVSNKALPAPIEKTISKAKGQPREPQVYTLPPSREEMTKNQVSLTCLVKGFYPSDIAVEWESNGQPENNYKTTPPVLDSDGSFFLYSKLTVDKSRWQQGNVFSCSVMHEALHNHYTQKSLSLSPGKGGGGSGGGGSGGGGSEVQLVESGGGLVQPGGSLRLSCAASGFNIKDTYIHWVRQAPGKGLEWVARIYPTNGYTRYADSVKGRFTISADTSKNTAYLQMNSLRAEDTAVYYCSRWGGDGFYAMDYWGQGTLVTVSSGGGGSGGGGSGGGGSDIQMTQSPSSLSASVGDRVTITCRASQDVNTAVAWYQQKPGKAPKLLIYSASFLYSGVPSRFSGSRSGTDFTLTISSLQPEDFATYYCQQHYTTPPTFGQGTKVEIK

SEQ ID NO: 123 - protein, 874 aa, Artificial Sequence
  Description of Artificial Sequence: Synthetic polypeptide
DASLPYLQKESVFQSGAHAYRIPALLYLPGQQSLLAFAEQRASKKDEHAELIVLRRGDYDAGTHQVQWQAQEVVAQARLDGHRSMNPCPLYDEQTGTLFLFFIAIPGQVTEQQQLQTRANVTRLCYVTSTDHGRTWSSPRDLTDAAIGPAYREWSTFAVGPGHCLQLHDRARSLVVPAYAYRKLHPKQRPIPSAFCFLSHDHGRTWARGHFVAQDTLECQVAEVETGEQRVVTLNARSHLRARVQAQSTNDGLDFQESQLVKKLVEPPPTGCQGSVISFPSPRSGPGSPAQWLLYTHPTHSWQRADLGAYLNPRPPAPEAWSEPVLLAKGSAAYSDLQSMGTGPDGSPLFGCLYEANDYEEIVFLMFTLKQAFPAEYLPQGGGGSGGGGSDKTHTCPPCPAPELLGGPSVFLFPPKPKDTLMISRTPEVTCVVVDVSHEDPEVKFNWYVDGVEVHNAKTKPREEQYNSTYRVVSVLTVLHQDWLNGKEYKCKVSNKALPAPIEKTISKAKGQPREPQVYTLPPSREEMTKNQVSLTCLVKGFYPSDIAVEWESNGQPENNYKTTPPVLDSDGSFFLYSKLTVDKSRWQQGNVFSCSVMHEALHNHYTQKSLSLSPGKGGGGSGGGGSGGGGSEVQLVESGGGLVQPGGSLRLSCAASGFNIKDTYIHWVRQAPGKGLEWVARIYPTNGYTRYADSVKGRFTISADTSKNTAYLQMNSLRAEDTAVYYCSRWGGDGFYAMDYWGQGTLVTVSSGGGGSGGGGSGGGGSDIQMTQSPSSLSASVGDRVTITCRASQDVNTAVAWYQQKPGKAPKLLIYSASFLYSGVPSRFSGSRSGTDFTLTISSLQPEDFATYYCQQHYTTPPTFGQGTKVEIK

SEQ ID NO: 124 - protein, 874 aa, Artificial Sequence
  Description of Artificial Sequence: Synthetic polypeptide
DASLPYLQKESVFQSGAHAYRIPALLYLPGQQSLLAFAEQRASKKDEHAELIVLRRGDYDAGTHQVQWQAQEVVAQARLDGHRSMNPCPLYDEQTGTLFLFFIAIPGQVTEQQQLQTRANVTRLCYVTSTDHGRTWSSPRDLTDAAIGPAYREWSTFAVGPGHCLQLHDRARSLVVPAYAYRKLHPKQRPIPSAFCFLSHDHGRTWARGHFVAQDTLECQVAEVETGEQRVVTLNARSHLRFRVQAQSTNDGLDFQESQLVKKLVEPPPTGCQGSVISFPSPRSGPGSPAQWLLYTHPTHSWQRADLGAYLNPRPPAPEAWSEPVLLAKGSAAYSDLQSMGTGPDGSPLFGCLYEANDYEEIVFLMFTLKQAFPAEYLPQGGGGSGGGGSDKTHTCPPCPAPELLGGPSVFLFPPKPKDTLMISRTPEVTCVVVDVSHEDPEVKFNWYVDGVEVHNAKTKPREEQYNSTYRVVSVLTVLHQDWLNGKEYKCKVSNKALPAPIEKTISKAKGQPREPQVYTLPPSREEMTKNQVSLTCLVKGFYPSDIAVEWESNGQPENNYKTTPPVLDSDGSFFLYSKLTVDKSRWQQGNVFSCSVMHEALHNHYTQKSLSLSPGKGGGGSGGGGSGGGGSEVQLVESGGGLVQPGGSLRLSCAASGFNIKDTYIHWVRQAPGKGLEWVARIYPTNGYTRYADSVKGRFTISADTSKNTAYLQMNSLRAEDTAVYYCSRWGGDGFYAMDYWGQGTLVTVSSGGGGSGGGGSGGGGSDIQMTQSPSSLSASVGDRVTITCRASQDVNTAVAWYQQKPGKAPKLLIYSASFLYSGVPSRFSGSRSGTDFTLTISSLQPEDFATYYCQQHYTTPPTFGQGTKVEIK

SEQ ID NO: 125 - protein, 869 aa, Artificial Sequence
  Description of Artificial Sequence: Synthetic polypeptide
DASLPYLQKESVFQSGAHAYRIPALLYLPGQQSLLAFAEQRASKKDEHAELIVLRRGDYDAGTHQVQWQAQEVVAQARLDGHRSMNPCPLYDEQTGTLFLFFIAIPGQVTEQQQLQTRANVTRLCQVTSTDHGRTWSSPRDLTDAAIGPAYREWSTFAVGPGHCLQLHDRARSLVVPAYAYRKLHPKQRPIPSAFCFLSHDHGRTWARGHFVAQDTLECQVAEVETGEQRVVTLNARSHLRARVQAQSTNDGLDFQESQLVKKLVEPPPQGCQGSVISFPSPRSGPGSPAQWLLYTHPTHSWQRADLGAYLNPRPPAPEAWSEPVLLAKGSAAYSDLQSMGTGPDGSPLFGCLYEANDYEEIVFLMFTLKQAFPAEYLPQEPKSSDKTHTCPPCPAPELLGGPSVFLFPPKPKDTLMISRTPEVTCVVVDVSHEDPEVKFNWYVDGVEVHNAKTKPREEQYNSTYRVVSVLTVLHQDWLNGKEYKCKVSNKALPAPIEKTISKAKGQPREPQVYTLPPSREEMTKNQVSLTCLVKGFYPSDIAVEWESNGQPENNYKTTPPVLDSDGSFFLYSKLTVDKSRWQQGNVFSCSVMHEALHNHYTQKSLSLSPGKGGGGSGGGGSGGGGSEVQLVESGGGLVQPGGSLRLSCAASGFNIKDTYIHWVRQAPGKGLEWVARIYPTNGYTRYADSVKGRFTISADTSKNTAYLQMNSLRAEDTAVYYCSRWGGDGFYAMDYWGQGTLVTVSSGGGGSGGGGSGGGGSDIQMTQSPSSLSASVGDRVTITCRASQDVNTAVAWYQQKPGKAPKLLIYSASFLYSGVPSRFSGSRSGTDFTLTISSLQPEDFATYYCQQHYTTPPTFGQGTKVEIK

SEQ ID NO: 126 - protein, 869 aa, Artificial Sequence
  Description of Artificial Sequence: Synthetic polypeptide
DASLPYLQDESVFQSGAHAYRIPALLYLPGQQSLLAFAEQRASKKDEHAELIVLRRGDYDAPTHQVQWQAQEVVAQARLDGHRSMNPCPLYDEQTGTLFLFFIAIPGQVTEQQQLQTRANVTRLCQVTSTDHGRTWSSPRDLTDAAIGPAYREWSTFAVGPGHCLQLHDRARSLVVPAYAYRKLHPKQRPIPSAFCFLSHDHGRTWARGHFVAQDTLECQVAEVETGEQRVVTLNARSHLRARVQAQSTNDGLDFQESQLVKKLVEPPPQGCQGSVISFPSPRSGPGSPAQWLLYTHPTHSWQRADLGAYLNPRPPAPEAWSEPVLLAKGSAAYSDLQSMGTGPDGSPLFGCLYEANDYEEIRFIMFTLKQAFPAEYLPQEPKSSDKTHTCPPCPAPELLGGPSVFLFPPKPKDTLMISRTPEVTCVVVDVSHEDPEVKFNWYVDGVEVHNAKTKPREEQYNSTYRVVSVLTVLHQDWLNGKEYKCKVSNKALPAPIEKTISKAKGQPREPQVYTLPPSREEMTKNQVSLTCLVKGFYPSDIAVEWESNGQPENNYKTTPPVLDSDGSFFLYSKLTVDKSRWQQGNVFSCSVMHEALHNHYTQKSLSLSPGKGGGGSGGGGSGGGGSEVQLVESGGGLVQPGGSLRLSCAASGFNIKDTYIHWVRQAPGKGLEWVARIYPTNGYTRYADSVKGRFTISADTSKNTAYLQMNSLRAEDTAVYYCSRWGGDGFYAMDYWGQGTLVTVSSGGGGSGGGGSGGGGSDIQMTQSPSSLSASVGDRVTITCRASQDVNTAVAWYQQKPGKAPKLLIYSASFLYSGVPSRFSGSRSGTDFTLTISSLQPEDFATYYCQQHYTTPPTFGQGTKVEIK

SEQ ID NO: 127 - protein, 869 aa, Artificial Sequence
  Description of Artificial Sequence: Synthetic polypeptide
DASLPYLQKESVFQSGAHAYRIPALLYLPGQQSLLAFAEQRASKKDEHAELIVLRRGDYDANTHQVQWQAQEVVAQARLDGHRSMNPCPLYDAQTGTLFLFFIAIPGQVTEQQQLQTRANVTRLCQVTSTDHGRTWSSPRDLTDAAIGPAYREWSTFAVGPGHCLQLHDRARSLVVPAYAYRKLHPKQRPIPSAFCFLSHDHGRTWARGHFVAQDTLECQVAEVETGEQRVVTLNARSHLRARVQAQSTNDGLDFQESQLVKKLVEPPPQGCQGSVISFPSPRSGPGSPAQWLLYTHPTHSWQRADLGAYLNPRPPAPEAWSEPVLLAKGSAAYSDLQSMGTGPDGSPLFGCLYEANDYEEIVFLMFTLKQAFPAEYLPQEPKSSDKTHTCPPCPAPELLGGPSVFLFPPKPKDTLMISRTPEVTCVVVDVSHEDPEVKFNWYVDGVEVHNAKTKPREEQYNSTYRVVSVLTVLHQDWLNGKEYKCKVSNKALPAPIEKTISKAKGQPREPQVYTLPPSREEMTKNQVSLTCLVKGFYPSDIAVEWESNGQPENNYKTTPPVLDSDGSFFLYSKLTVDKSRWQQGNVFSCSVMHEALHNHYTQKSLSLSPGKGGGGSGGGGSGGGGSEVQLVESGGGLVQPGGSLRLSCAASGFNIKDTYIHWVRQAPGKGLEWVARIYPTNGYTRYADSVKGRFTISADTSKNTAYLQMNSLRAEDTAVYYCSRWGGDGFYAMDYWGQGTLVTVSSGGGGSGGGGSGGGGSDIQMTQSPSSLSASVGDRVTITCRASQDVNTAVAWYQQKPGKAPKLLIYSASFLYSGVPSRFSGSRSGTDFTLTISSLQPEDFATYYCQQHYTTPPTFGQGTKVEIK

SEQ ID NO: 128 - protein, 869 aa, Artificial Sequence
  Description of Artificial Sequence: Synthetic polypeptide
DASLPYLQKESVFQSGAHAYRIPALLYLPGQQSLLAFAEQRASKKDEHAELIVLRRGDYDAPTHQVQWQAQEVVAQARLDGHRSMNPCPLYDAQTGTLFLFFIAIPGQVTEQQQLQTRANVTRLCQVTSTDHGRTWSSPRDLTDAAIGPAYREWSTFAVGPGHCLQLHDRARSLVVPAYAYRKLHPKQRPIPSAFCFLSHDHGRTWARGHFVAQDTLECQVAEVETGEQRVVTLNARSHLRARVQAQSTNDGLDFQESQLVKKLVEPPPAGCQGSVISFPSPRSGPGSPAQWLLYTHPTHRKQRADLGAYLNPRPPAPEAWSEPVLLAKGSAAYSDLQSMGTGPDGSPLFGCLYEANDYEEIVFLMFTLKQAFPAEYLPQEPKSSDKTHTCPPCPAPELLGGPSVFLFPPKPKDTLMISRTPEVTCVVVDVSHEDPEVKFNWYVDGVEVHNAKTKPREEQYNSTYRVVSVLTVLHQDWLNGKEYKCKVSNKALPAPIEKTISKAKGQPREPQVYTLPPSREEMTKNQVSLTCLVKGFYPSDIAVEWESNGQPENNYKTTPPVLDSDGSFFLYSKLTVDKSRWQQGNVFSCSVMHEALHNHYTQKSLSLSPGKGGGGSGGGGSGGGGSEVQLVESGGGLVQPGGSLRLSCAASGFNIKDTYIHWVRQAPGKGLEWVARIYPTNGYTRYADSVKGRFTISADTSKNTAYLQMNSLRAEDTAVYYCSRWGGDGFYAMDYWGQGTLVTVSSGGGGSGGGGSGGGGSDIQMTQSPSSLSASVGDRVTITCRASQDVNTAVAWYQQKPGKAPKLLIYSASFLYSGVPSRFSGSRSGTDFTLTISSLQPEDFATYYCQQHYTTPPTFGQGTKVEIK

SEQ ID NO: 129 - protein, 869 aa, Artificial Sequence
  Description of Artificial Sequence: Synthetic polypeptide
DASLPYLQKESVFQSGAHAYRIPALLYLPGQQSLLAFAEQRASKKDEHAELIVLRRGDYDASTHQVQWQAQEVVAQARLDGHRSMNPCPLYDAQTGTLFLFFIAIPGQVTEQQQLQTRANVTRLCQVTSTDHGRTWSSPRDLTDAAIGPAYREWSTFAVGPGHCLQLHDRARSLVVPAYAYRKLHPKQRPIPSAFCFLSHDHGRTWARGHFVAQDTLECQVAEVETGEQRVVTLNARSHLRARVQAQSTNDGLDFQESQLVKKLVEPPPAGCQGSVISFPSPRSGPGSPAQWLLYTHPTHRKQRADLGAYLNPRPPAPEAWSEPVLLAKGSAAYSDLQSMGTGPDGSPLFGCLYEANDYEEIVFLMFTLKQAFPAEYLPQEPKSSDKTHTCPPCPAPELLGGPSVFLFPPKPKDTLMISRTPEVTCVVVDVSHEDPEVKFNWYVDGVEVHNAKTKPREEQYNSTYRVVSVLTVLHQDWLNGKEYKCKVSNKALPAPIEKTISKAKGQPREPQVYTLPPSREEMTKNQVSLTCLVKGFYPSDIAVEWESNGQPENNYKTTPPVLDSDGSFFLYSKLTVDKSRWQQGNVFSCSVMHEALHNHYTQKSLSLSPGKGGGGSGGGGSGGGGSEVQLVESGGGLVQPGGSLRLSCAASGFNIKDTYIHWVRQAPGKGLEWVARIYPTNGYTRYADSVKGRFTISADTSKNTAYLQMNSLRAEDTAVYYCSRWGGDGFYAMDYWGQGTLVTVSSGGGGSGGGGSGGGGSDIQMTQSPSSLSASVGDRVTITCRASQDVNTAVAWYQQKPGKAPKLLIYSASFLYSGVPSRFSGSRSGTDFTLTISSLQPEDFATYYCQQHYTTPPTFGQGTKVEIK

SEQ ID NO: 130 - protein, 869 aa, Artificial Sequence
  Description of Artificial Sequence: Synthetic polypeptide
DASLPYLQKESVFQSGAHAYRIPALLYLPGQQSLLAFAEQRASKKDEHAELIVLRRGDYDATTHQVQWQAQEVVAQARLDGHRSMNPCPLYDAQTGTLFLFFIAIPGQVTEQQQLQTRANVTRLCQVTSTDHGRTWSSPRDLTDAAIGPAYREWSTFAVGPGHCLQLHDRARSLVVPAYAYRKLHPKQRPIPSAFCFLSHDHGRTWARGHFVAQDTLECQVAEVETGEQRVVTLNARSHLRARVQAQSTNDGLDFQESQLVKKLVEPPPAGCQGSVISFPSPRSGPGSPAQWLLYTHPTHRKQRADLGAYLNPRPPAPEAWSEPVLLAKGSAAYSDLQSMGTGPDGSPLFGCLYEANDYEEIVFLMFTLKQAFPAEYLPQEPKSSDKTHTCPPCPAPELLGGPSVFLFPPKPKDTLMISRTPEVTCVVVDVSHEDPEVKFNWYVDGVEVHNAKTKPREEQYNSTYRVVSVLTVLHQDWLNGKEYKCKVSNKALPAPIEKTISKAKGQPREPQVYTLPPSREEMTKNQVSLTCLVKGFYPSDIAVEWESNGQPENNYKTTPPVLDSDGSFFLYSKLTVDKSRWQQGNVFSCSVMHEALHNHYTQKSLSLSPGKGGGGSGGGGSGGGGSEVQLVESGGGLVQPGGSLRLSCAASGFNIKDTYIHWVRQAPGKGLEWVARIYPTNGYTRYADSVKGRFTISADTSKNTAYLQMNSLRAEDTAVYYCSRWGGDGFYAMDYWGQGTLVTVSSGGGGSGGGGSGGGGSDIQMTQSPSSLSASVGDRVTITCRASQDVNTAVAWYQQKPGKAPKLLIYSASFLYSGVPSRFSGSRSGTDFTLTISSLQPEDFATYYCQQHYTTPPTFGQGTKVEIK

SEQ ID NO: 131 - protein, 869 aa, Artificial Sequence
  Description of Artificial Sequence: Synthetic polypeptide
DASLPYLQKESVFQSGAHAYRIPALLYLPGQQSLLAFAEQRASKKDEHAELIVLRRGDYDANTHQVQWQAQEVVAQARLDGHRSMNPCPLYDAQTGTLFLFFIAIPGQVTEQQQLQTRANVTRLCQVTSTDHGRTWSSPRDLTDAAIGPAYREWSTFAVGPGHCLQLHDRARSLVVPAYAYRKLHPKQRPIPSAFCFLSHDHGRTWARGHFVAQDTLECQVAEVETGEQRVVTLNARSHLRARVQAQSTNDGLDFQESQLVKKLVEPPPAGCQGSVISFPSPRSGPGSPAQWLLYTHPTHRKQRADLGAYLNPRPPAPEAWSEPVLLAKGSAAYSDLQSMGTGPDGSPLFGCLYEANDYEEIVFLMFTLKQAFPAEYLPQEPKSSDKTHTCPPCPAPELLGGPSVFLFPPKPKDTLMISRTPEVTCVVVDVSHEDPEVKFNWYVDGVEVHNAKTKPREEQYNSTYRVVSVLTVLHQDWLNGKEYKCKVSNKALPAPIEKTISKAKGQPREPQVYTLPPSREEMTKNQVSLTCLVKGFYPSDIAVEWESNGQPENNYKTTPPVLDSDGSFFLYSKLTVDKSRWQQGNVFSCSVMHEALHNHYTQKSLSLSPGKGGGGSGGGGSGGGGSEVQLVESGGGLVQPGGSLRLSCAASGFNIKDTYIHWVRQAPGKGLEWVARIYPTNGYTRYADSVKGRFTISADTSKNTAYLQMNSLRAEDTAVYYCSRWGGDGFYAMDYWGQGTLVTVSSGGGGSGGGGSGGGGSDIQMTQSPSSLSASVGDRVTITCRASQDVNTAVAWYQQKPGKAPKLLIYSASFLYSGVPSRFSGSRSGTDFTLTISSLQPEDFATYYCQQHYTTPPTFGQGTKVEIK

SEQ ID NO: 132 - protein, 869 aa, Artificial Sequence
  Description of Artificial Sequence: Synthetic polypeptide
DASLPYLQKESVFQSGAHAYRIPALLYLPGQQSLLAFAEQRASKKDEHAELIVLRRGDYDAGTHQVQWQAQEVVAQARLDGHRSMNPCPLYDEQTGTLFLFFIAIPGQVTEQQQLQTRANVTRLCQVTSTDHGRTWSSPRDLTDAAIGPAYREWSTFAVGPGHCLQLHDRARSLVVPAYAYRKLHPKQRPIPSAFCFLSHDHGRTWARGHFVAQDTLECQVAEVETGEQRVVTLNARSHLRARVQAQSTNDGLDFQESQLVKKLVEPPPQGCQGSVISFPSPRSGPGSPAQWLLYTHPTHARQRADLGAYLNPRPPAPEAWSEPVLLAKGSAAYSDLQSMGTGPDGSPLFGCLYEANDYEEIVFLMFTLKQAFPAEYLPQEPKSSDKTHTCPPCPAPELLGGPSVFLFPPKPKDTLMISRTPEVTCVVVDVSHEDPEVKFNWYVDGVEVHNAKTKPREEQYNSTYRVVSVLTVLHQDWLNGKEYKCKVSNKALPAPIEKTISKAKGQPREPQVYTLPPSREEMTKNQVSLTCLVKGFYPSDIAVEWESNGQPENNYKTTPPVLDSDGSFFLYSKLTVDKSRWQQGNVFSCSVMHEALHNHYTQKSLSLSPGKGGGGSGGGGSGGGGSEVQLVESGGGLVQPGGSLRLSCAASGFNIKDTYIHWVRQAPGKGLEWVARIYPTNGYTRYADSVKGRFTISADTSKNTAYLQMNSLRAEDTAVYYCSRWGGDGFYAMDYWGQGTLVTVSSGGGGSGGGGSGGGGSDIQMTQSPSSLSASVGDRVTITCRASQDVNTAVAWYQQKPGKAPKLLIYSASFLYSGVPSRFSGSRSGTDFTLTISSLQPEDFATYYCQQHYTTPPTFGQGTKVEIK

SEQ ID NO: 133 - protein, 869 aa, Artificial Sequence
  Description of Artificial Sequence: Synthetic polypeptide
DASLPYLQKESVFQSGAHAYRIPALLYLPGQQSLLAFAEQRASKKDEHAELIVLRRGDYDAGTHQVQWQAQEVVAQARLDGHRSMNPCPLYDEQTGTLFLFFIAIPGQVTEQQQLQTRANVTRLCYVTSTDHGRTWSSPRDLTDAAIGPAYREWSTFAVGPGHCLQLHDRARSLVVPAYAYRKLHPKQRPIPSAFCFLSHDHGRTWARGHFVAQDTLECQVAEVETGEQRVVTLNARSHLRARVQAQSTNDGLDFQESQLVKKLVEPPPTGCQGSVISFPSPRSGPGSPAQWLLYTHPTHSWQRADLGAYLNPRPPAPEAWSEPVLLAKGSAAYSDLQSMGTGPDGSPLFGCLYEANDYEEIVFLMFTLKQAFPAEYLPQEPKSSDKTHTCPPCPAPELLGGPSVFLFPPKPKDTLMISRTPEVTCVVVDVSHEDPEVKFNWYVDGVEVHNAKTKPREEQYNSTYRVVSVLTVLHQDWLNGKEYKCKVSNKALPAPIEKTISKAKGQPREPQVYTLPPSREEMTKNQVSLTCLVKGFYPSDIAVEWESNGQPENNYKTTPPVLDSDGSFFLYSKLTVDKSRWQQGNVFSCSVMHEALHNHYTQKSLSLSPGKGGGGSGGGGSGGGGSEVQLVESGGGLVQPGGSLRLSCAASGFNIKDTYIHWVRQAPGKGLEWVARIYPTNGYTRYADSVKGRFTISADTSKNTAYLQMNSLRAEDTAVYYCSRWGGDGFYAMDYWGQGTLVTVSSGGGGSGGGGSGGGGSDIQMTQSPSSLSASVGDRVTITCRASQDVNTAVAWYQQKPGKAPKLLIYSASFLYSGVPSRFSGSRSGTDFTLTISSLQPEDFATYYCQQHYTTPPTFGQGTKVEIK

SEQ ID NO: 134 - protein, 869 aa, Artificial Sequence
  Description of Artificial Sequence: Synthetic polypeptide
DASLPYLQKESVFQSGAHAYRIPALLYLPGQQSLLAFAEQRASKKDEHAELIVLRRGDYDAGTHQVQWQAQEVVAQARLDGHRSMNPCPLYDEQTGTLFLFFIAIPGQVTEQQQLQTRANVTRLCYVTSTDHGRTWSSPRDLTDAAIGPAYREWSTFAVGPGHCLQLHDRARSLVVPAYAYRKLHPKQRPIPSAFCFLSHDHGRTWARGHFVAQDTLECQVAEVETGEQRVVTLNARSHLRFRVQAQSTNDGLDFQESQLVKKLVEPPPTGCQGSVISFPSPRSGPGSPAQWLLYTHPTHSWQRADLGAYLNPRPPAPEAWSEPVLLAKGSAAYSDLQSMGTGPDGSPLFGCLYEANDYEEIVFLMFTLKQAFPAEYLPQEPKSSDKTHTCPPCPAPELLGGPSVFLFPPKPKDTLMISRTPEVTCVVVDVSHEDPEVKFNWYVDGVEVHNAKTKPREEQYNSTYRVVSVLTVLHQDWLNGKEYKCKVSNKALPAPIEKTISKAKGQPREPQVYTLPPSREEMTKNQVSLTCLVKGFYPSDIAVEWESNGQPENNYKTTPPVLDSDGSFFLYSKLTVDKSRWQQGNVFSCSVMHEALHNHYTQKSLSLSPGKGGGGSGGGGSGGGGSEVQLVESGGGLVQPGGSLRLSCAASGFNIKDTYIHWVRQAPGKGLEWVARIYPTNGYTRYADSVKGRFTISADTSKNTAYLQMNSLRAEDTAVYYCSRWGGDGFYAMDYWGQGTLVTVSSGGGGSGGGGSGGGGSDIQMTQSPSSLSASVGDRVTITCRASQDVNTAVAWYQQKPGKAPKLLIYSASFLYSGVPSRFSGSRSGTDFTLTISSLQPEDFATYYCQQHYTTPPTFGQGTKVEIK

SEQ ID NO: 135 - protein, 874 aa, Artificial Sequence
  Description of Artificial Sequence: Synthetic polypeptide
  MOD_RES (1)..(1): Ala, Arg, Asn, Asp, Gln, Glu, Gly, His, Leu, Lys, Met, Phe, Thr, Val, or not present
  MOD_RES (6)..(6): Phe, Trp, Tyr or Val
  MOD_RES (9)..(9): Lys or Asp
  MOD_RES (62)..(62): Pro, Asn, Asp, His, Glu, Gly, Ser or Thr
  MOD_RES (93)..(93): Ala, Glu, or Lys
  MOD_RES (126)..(126): Gln, Leu, Glu, Phe, His, Ile, Leu, or Tyr
  MOD_RES (187)..(187): Arg, Ile, or Lys
  MOD_RES (242)..(242): Ala, Cys, Phe, Gly, His, Ile, Lys, Leu, Met, Asn, Gln, Arg, Ser, Val, Trp, or Tyr
  MOD_RES (270)..(270): Gln, Ala, His, Phe, Pro, Ser, or Thr
  MOD_RES (301)..(301): Ser, Arg, Ala, Asp, Glu, Phe, Gly, His, Ile, Lys, Leu, Met, Asn, Pro, Gln, Thr, Val, Trp, or Tyr
  MOD_RES (302)..(302): Trp, Lys, Ala, Asp, Glu, Phe, Gly, His, Ile, Lys, Leu, Met, Asn, Pro, Gln, Arg, Ser, Thr, Val, or Tyr
  MOD_RES (332)..(332): Ala, Cys, Ser, or Val
  MOD_RES (363)..(363): Val or Arg
  MOD_RES (365)..(365): Leu, Gln, His, Ile, Lys, or Ser
  MOD_RES (381)..(390): This region may encompass "GGGGS", "GGGGSGGGGS" or "EPKSS"
  See specification as filed for detailed description of substitutions and preferred embodiments
XASLPXLQXESVFQSGAHAYRIPALLYLPGQQSLLAFAEQRASKKDEHAELIVLRRGDYDAXTHQVQWQAQEVVAQARLDGHRSMNPCPLYDXQTGTLFLFFIAIPGQVTEQQQLQTRANVTRLCXVTSTDHGRTWSSPRDLTDAAIGPAYREWSTFAVGPGHCLQLHDRARSLVVPAYAYRKLHPXQRPIPSAFCFLSHDHGRTWARGHFVAQDTLECQVAEVETGEQRVVTLNARSHLRXRVQAQSTNDGLDFQESQLVKKLVEPPPXGCQGSVISFPSPRSGPGSPAQWLLYTHPTHXXQRADLGAYLNPRPPAPEAWSEPVLLAKGSXAYSDLQSMGTGPDGSPLFGCLYEANDYEEIXFXMFTLKQAFPAEYLPQXXXXXXXXXXDKTHTCPPCPAPELLGGPSVFLFPPKPKDTLMISRTPEVTCVVVDVSHEDPEVKFNWYVDGVEVHNAKTKPREEQYNSTYRVVSVLTVLHQDWLNGKEYKCKVSNKALPAPIEKTISKAKGQPREPQVYTLPPSREEMTKNQVSLTCLVKGFYPSDIAVEWESNGQPENNYKTTPPVLDSDGSFFLYSKLTVDKSRWQQGNVFSCSVMHEALHNHYTQKSLSLSPGKGGGGSGGGGSGGGGSEVQLVESGGGLVQPGGSLRLSCAASGFNIKDTYIHWVRQAPGKGLEWVARIYPTNGYTRYADSVKGRFTISADTSKNTAYLQMNSLRAEDTAVYYCSRWGGDGFYAMDYWGQGTLVTVSSGGGGSGGGGSGGGGSDIQMTQSPSSLSASVGDRVTITCRASQDVNTAVAWYQQKPGKAPKLLIYSASFLYSGVPSRFSGSRSGTDFTLTISSLQPEDFATYYCQQHYTTPPTFGQGTKVEIK

SEQ ID NO: 136 - protein, 874 aa, Artificial Sequence
  Description of Artificial Sequence: Synthetic polypeptide
  MOD_RES (1)..(1): Ala, Arg, Asn, Asp, Gln, Glu, Gly, His, Leu, Lys, Met, Phe, Thr, Val, or not present
  MOD_RES (2)..(2): Ala or Lys
  MOD_RES (4)..(4): Asn or Leu
  MOD_RES (5)..(5): Pro or His
  MOD_RES (6)..(6): Phe, Trp, Tyr or Val
  MOD_RES (9)..(9): Lys or Asp
  MOD_RES (44)..(44): Lys, Arg, or Glu
  MOD_RES (45)..(45): Lys, Ala, Arg, or Glu
  MOD_RES (54)..(54): Leu or Met
  MOD_RES (62)..(62): Pro, Asn, Asp, His, Glu, Gly, Ser or Thr
  MOD_RES (69)..(69): Gln or His
  MOD_RES (78)..(78): Arg or Lys
  MOD_RES (80)..(80): Asp or Pro
  MOD_RES (93)..(93): Ala, Glu or Lys
  MOD_RES (107)..(107): Gly or Asp
  MOD_RES (108)..(108): Gln or His
  MOD_RES (112)..(112): Gln, Arg, or Lys
  MOD_RES (125)..(125): Ala, Cys, Ile, Ser, Val, or Leu
  MOD_RES (126)..(126): Gln, Leu, Glu, Phe, His, Ile, Leu, or Tyr
  MOD_RES (150)..(150): Ala or Val
  MOD_RES (164)..(164): Cys or Gly
  MOD_RES (170)..(170): Arg or Pro
  MOD_RES (171)..(171): Ala or Gly
  MOD_RES (187)..(187): Arg, Ile, or Lys
  MOD_RES (188)..(188): Gln or Pro
  MOD_RES (189)..(189): Arg or Pro
  MOD_RES (196)..(196): Ala, Cys, Leu, or Val
  MOD_RES (213)..(213): Ala, Cys, Asn, Ser, or Thr
  MOD_RES (217)..(217): Leu, Ala, or Val
  MOD_RES (225)..(225): Glu or Pro
  MOD_RES (239)..(239): His or Pro
  MOD_RES (240)..(240): Leu, Asp, Asn, or Tyr
  MOD_RES (241)..(241): Arg, Ala, Asp, Leu, Gln, or Tyr
  MOD_RES (242)..(242): Ala, Cys, Phe, Gly, His, Ile, Lys, Leu, Met, Asn, Gln, Arg, Ser, Val, Trp, or Tyr
  MOD_RES (244)..(244): Val, Ile, or Lys
  MOD_RES (249)..(249): Thr or Ala
  MOD_RES (251)..(251): Asp or Gly
  MOD_RES (257)..(257): Glu, Lys, or Pro
  MOD_RES (258)..(258): Ser or Cys
  MOD_RES (260)..(260): Leu, Asp, Phe, Gln, or Thr
  MOD_RES (265)..(265): Val or Phe
  MOD_RES (270)..(270): Gln, Ala, His, Phe, Pro, Ser, or Thr
  MOD_RES (272)..(272): Cys or Val
  MOD_RES (292)..(292): Trp or Arg
  MOD_RES (301)..(301): Ser, Arg, Ala, Asp, Glu, Phe, Gly, His, Ile, Lys, Leu, Met, Asn, Pro, Gln, Thr, Val, Trp, or Tyr
  MOD_RES (302)..(302): Trp, Lys, Ala, Asp, Glu, Phe, Gly, His, Ile, Lys, Leu, Met, Asn, Pro, Gln, Arg, Ser, Thr, Val, or Tyr
  MOD_RES (325)..(325): Lys or Val
  MOD_RES (332)..(332): Ala, Cys, Ser, or Val
  MOD_RES (352)..(352): Cys, Leu, or Val
  MOD_RES (363)..(363): Val or Arg
  MOD_RES (365)..(365): Leu, Gln, His, Ile, Lys, or Ser
  MOD_RES (381)..(390): This region may encompass "GGGGS", "GGGGSGGGGS" or "EPKSS"
  See specification as filed for detailed description of substitutions and preferred embodiments
XXSXXXLQXESVFQSGAHAYRIPALLYLPGQQSLLAFAEQRASXXDEHAELIVXRRGDYDAXTHQVQWXAQEVVAQAXLXGHRSMNPCPLYDXQTGTLFLFFIAIPXXVTEXQQLQTRANVTRLXXVTSTDHGRTWSSPRDLTDAAIGPXYREWSTFAVGPGHXLQLHDXXRSLVVPAYAYRKLHPXXXPIPSAFXFLSHDHGRTWARGHFVXQDTXECQVAEVXTGEQRVVTLNARSXXXXRXQAQSXNXGLDFQXXQXVKKLXEPPPXGXQGSVISFPSPRSGPGSPAQXLLYTHPTHXXQRADLGAYLNPRPPAPEAWSEPXLLAKGSXAYSDLQSMGTGPDGSPLFGXLYEANDYEEIXFXMFTLKQAFPAEYLPQXXXXXXXXXXDKTHTCPPCPAPELLGGPSVFLFPPKPKDTLMISRTPEVTCVVVDVSHEDPEVKFNWYVDGVEVHNAKTKPREEQYNSTYRVVSVLTVLHQDWLNGKEYKCKVSNKALPAPIEKTISKAKGQPREPQVYTLPPSREEMTKNQVSLTCLVKGFYPSDIAVEWESNGQPENNYKTTPPVLDSDGSFFLYSKLTVDKSRWQQGNVFSCSVMHEALHNHYTQKSLSLSPGKGGGGSGGGGSGGGGSEVQLVESGGGLVQPGGSLRLSCAASGFNIKDTYIHWVRQAPGKGLEWVARIYPTNGYTRYADSVKGRFTISADTSKNTAYLQMNSLRAEDTAVYYCSRWGGDGFYAMDYWGQGTLVTVSSGGGGSGGGGSGGGGSDIQMTQSPSSLSASVGDRVTITCRASQDVNTAVAWYQQKPGKAPKLLIYSASFLYSGVPSRFSGSRSGTDFTLTISSLQPEDFATYYCQQHYTTPPTFGQGTKVEIK

SEQ ID NO: 137 - DNA, 1140 bp, Artificial Sequence
  Description of Artificial Sequence: Synthetic polynucleotide
gatgcatctctgccttacctgcagaaagaaagcgtgttccagtctggcgcccacgcctacagaattcccgctctgctgtatctgccaggccagcagtctctgctggctttcgctgaacagcgggccagcaagaaggatgagcacgccgaactgatcgtgctgcggagaggcgattacgacgccggcacacatcaggtgcagtggcaggctcaagaggtggtggctcaggctagactggacggccacagatctatgaacccctgtcctctgtacgatgaacagaccggcacactgtttctgttctttatcgctatccccggccaagtgaccgagcagcagcagctgcagacaagagccaacgtgaccagactgtgttacgtgacctccaccgaccacggcagaacctggtctagccctagagatctgaccgacgccgccatcggacctgcctatagagagtggtccaccttcgccgttggacctggacactgtctccagctgcacgacagggctagatctctggtggtgcctgcctacgcctatagaaagctgcaccccaaacagcggcctattcctagcgccttctgctttctgagccacgatcacggcaggacatgggccagaggacatttcgtggcccaggacacactggaatgccaggtggccgaagtggaaaccggcgagcagagagtcgtgaccctgaacgccagatctcacctgagattcagagtgcaggcccagagcacaaacgacggcctggatttccaagagagccagctggtcaagaaactggtggaacctcctccaaccggctgtcagggaagcgtgatcagctttccatctcctagaagcggccctggctctcctgctcagtggctgctgtatacacaccccacacacagctggcagagagccgatctgggcgcctacctgaatcctagacctcctgctcctgaggcttggagcgaacctgttctgctggccaagggcagcgctgcctacagcgatctgcagtctatgggcacaggccctgatggcagccctctgtttggctgtctgtacgaggccaacgactacgaagagatcgtgttcctgatgttcaccctgaagcaggcctttccagccgagtacctgcctcaa

SEQ ID NO: 138 - protein, 380 aa, Artificial Sequence
  Description of Artificial Sequence: Synthetic polypeptide
  MOD_RES (1)..(1): Ala, Arg, Asn, Asp, Gln, Glu, Gly, His, Leu, Lys, Met, Phe, Thr, Val, or not present
  MOD_RES (6)..(6): Phe, Trp, Tyr or Val
  MOD_RES (9)..(9): Lys or Asp
  MOD_RES (62)..(62): Pro, Asn, Asp, His, Glu, Gly, Ser or Thr
  MOD_RES (93)..(93): Ala, Glu, or Lys
  MOD_RES (126)..(126): Gln, Leu, Glu, Phe, His, Ile, Leu, or Tyr
  MOD_RES (187)..(187): Arg, Ile, or Lys
  MOD_RES (242)..(242): Ala, Cys, Phe, Gly, His, Ile, Lys, Leu, Met, Asn, Gln, Arg, Ser, Val, Trp, or Tyr
  MOD_RES (270)..(270): Gln, Ala, His, Phe, Pro, Ser, or Thr
  MOD_RES (301)..(301): Ser, Arg, Ala, Asp, Glu, Phe, Gly, His, Ile, Lys, Leu, Met, Asn, Pro, Gln, Thr, Val, Trp, or Tyr
  MOD_RES (302)..(302): Trp, Lys, Ala, Asp, Glu, Phe, Gly, His, Ile, Lys, Leu, Met, Asn, Pro, Gln, Arg, Ser, Thr, Val, or Tyr
  MOD_RES (332)..(332): Ala, Cys, Ser, or Val
  MOD_RES (363)..(363): Val or Arg
  MOD_RES (365)..(365): Leu, Gln, His, Ile, Lys, or Ser
  See specification as filed for detailed description of substitutions and preferred embodiments
XASLPXLQXESVFQSGAHAYRIPALLYLPGQQSLLAFAEQRASKKDEHAELIVLRRGDYDAXTHQVQWQAQEVVAQARLDGHRSMNPCPLYDXQTGTLFLFFIAIPGQVTEQQQLQTRANVTRLCXVTSTDHGRTWSSPRDLTDAAIGPAYREWSTFAVGPGHCLQLHDRARSLVVPAYAYRKLHPXQRPIPSAFCFLSHDHGRTWARGHFVAQDTLECQVAEVETGEQRVVTLNARSHLRXRVQAQSTNDGLDFQESQLVKKLVEPPPXGCQGSVISFPSPRSGPGSPAQWLLYTHPTHXXQRADLGAYLNPRPPAPEAWSEPVLLAKGSXAYSDLQSMGTGPDGSPLFGCLYEANDYEEIXFXMFTLKQAFPAEYLPQ

SEQ ID NO: 139 - protein, 380 aa, Artificial Sequence
  Description of Artificial Sequence: Synthetic polypeptide
  MOD_RES (1)..(1): Ala, Arg, Asn, Asp, Gln, Glu, Gly, His, Leu, Lys, Met, Phe, Thr, Val, or not present
  MOD_RES (2)..(2): Ala or Lys
  MOD_RES (4)..(4): Asn or Leu
  MOD_RES (5)..(5): Pro or His
  MOD_RES (6)..(6): Phe, Trp, Tyr or Val
  MOD_RES (9)..(9): Lys or Asp
  MOD_RES (44)..(44): Lys, Arg, or Glu
  MOD_RES (45)..(45): Lys, Ala, Arg, or Glu
  MOD_RES (54)..(54): Leu or Met
  MOD_RES (62)..(62): Pro, Asn, Asp, His, Glu, Gly, Ser or Thr
  MOD_RES (69)..(69): Gln or His
  MOD_RES (78)..(78): Arg or Lys
  MOD_RES (80)..(80): Asp or Pro
  MOD_RES (93)..(93): Ala, Glu or Lys
  MOD_RES (107)..(107): Gly or Asp
  MOD_RES (108)..(108): Gln or His
  MOD_RES (112)..(112): Gln, Arg, or Lys
  MOD_RES (125)..(125): Ala, Cys, Ile, Ser, Val, or Leu
  MOD_RES (126)..(126): Gln, Leu, Glu, Phe, His, Ile, Leu, or Tyr
  MOD_RES (150)..(150): Ala or Val
  MOD_RES (164)..(164): Cys or Gly
  MOD_RES (170)..(170): Arg or Pro
  MOD_RES (171)..(171): Ala or Gly
  MOD_RES (187)..(187): Arg, Ile, or Lys
  MOD_RES (188)..(188): Gln or Pro
  MOD_RES (189)..(189): Arg or Pro
  MOD_RES (196)..(196): Ala, Cys, Leu, or Val
  MOD_RES (213)..(213): Ala, Cys, Asn, Ser, or Thr
  MOD_RES (217)..(217): Leu, Ala, or Val
  MOD_RES (225)..(225): Glu or Pro
  MOD_RES (239)..(239): His or Pro
  MOD_RES (240)..(240): Leu, Asp, Asn, or Tyr
  MOD_RES (241)..(241): Arg, Ala, Asp, Leu, Gln, or Tyr
  MOD_RES (242)..(242): Ala, Cys, Phe, Gly, His, Ile, Lys, Leu, Met, Asn, Gln, Arg, Ser, Val, Trp, or Tyr
  MOD_RES (244)..(244): Val, Ile, or Lys
  MOD_RES (249)..(249): Thr or Ala
  MOD_RES (251)..(251): Asp or Gly
  MOD_RES (257)..(257): Glu, Lys, or Pro
  MOD_RES (258)..(258): Ser or Cys
  MOD_RES (260)..(260): Leu, Asp, Phe, Gln, or Thr
  MOD_RES (265)..(265): Val or Phe
  MOD_RES (270)..(270): Gln, Ala, His, Phe, Pro, Ser, or Thr
  MOD_RES (272)..(272): Cys or Val
  MOD_RES (292)..(292): Trp or Arg
  MOD_RES (301)..(301): Ser, Arg, Ala, Asp, Glu, Phe, Gly, His, Ile, Lys, Leu, Met, Asn, Pro, Gln, Thr, Val, Trp, or Tyr
  MOD_RES (302)..(302): Trp, Lys, Ala, Asp, Glu, Phe, Gly, His, Ile, Lys, Leu, Met, Asn, Pro, Gln, Arg, Ser, Thr, Val, or Tyr
  MOD_RES (325)..(325): Lys or Val
  MOD_RES (332)..(332): Ala, Cys, Ser, or Val
  MOD_RES (352)..(352): Cys, Leu, or Val
  MOD_RES (363)..(363): Val or Arg
  MOD_RES (365)..(365): Leu, Gln, His, Ile, Lys, or Ser
  See specification as filed for detailed description of substitutions and preferred embodiments
XXSXXXLQXESVFQSGAHAYRIPALLYLPGQQSLLAFAEQRASXXDEHAELIVXRRGDYDAXTHQVQWXAQEVVAQAXLXGHRSMNPCPLYDXQTGTLFLFFIAIPXXVTEXQQLQTRANVTRLXXVTSTDHGRTWSSPRDLTDAAIGPXYREWSTFAVGPGHXLQLHDXXRSLVVPAYAYRKLHPXXXPIPSAFXFLSHDHGRTWARGHFVXQDTXECQVAEVXTGEQRVVTLNARSXXXXRXQAQSXNXGLDFQXXQXVKKLXEPPPXGXQGSVISFPSPRSGPGSPAQXLLYTHPTHXXQRADLGAYLNPRPPAPEAWSEPXLLAKGSXAYSDLQSMGTGPDGSPLFGXLYEANDYEEIXFXMFTLKQAFPAEYLPQ

SEQ ID NO: 140 - protein, 5 aa, Artificial Sequence
  Description of Artificial Sequence: Synthetic peptide
GGGGS

SEQ ID NO: 141 - protein, 617 aa, Artificial Sequence
  Description of Artificial Sequence: Synthetic polypeptide
DASLPYLQKESVFQSGAHAYRIPALLYLPGQQSLLAFAEQRASKKDEHAELIVLRRGDYDAPTHQVQWQAQEVVAQARLDGHRSMNPCPLYDAQTGTLFLFFIAIPGQVTEQQQLQTRANVTRLCQVTSTDHGRTWSSPRDLTDAAIGPAYREWSTFAVGPGHCLQLHDRARSLVVPAYAYRKLHPKQRPIPSAFCFLSHDHGRTWARGHFVAQDTLECQVAEVETGEQRVVTLNARSHLRARVQAQSTNDGLDFQESQLVKKLVEPPPQGCQGSVISFPSPRSGPGSPAQWLLYTHPTHSWQRADLGAYLNPRPPAPEAWSEPVLLAKGSAAYSDLQSMGTGPDGSPLFGCLYEANDYEEIVFLMFTLKQAFPAEYLPQGGGGSGGGGSDKTHTCPPCPAPELLGGPSVFLFPPKPKDTLMISRTPEVTCVVVDVSHEDPEVKFNWYVDGVEVHNAKTKPREEQYNSTYRVVSVLTVLHQDWLNGKEYKCKVSNKALPAPIEKTISKAKGQPREPQVYTLPPSREEMTKNQVSLTCLVKGFYPSDIAVEWESNGQPENNYKTTPPVLDSDGSFFLTSKLTVDKSRWQQGNVFSCSVMHEALHNHYTQKSLSLSPGK

SEQ ID NO: 142 - DNA, 1851 bp, Artificial Sequence
  Description of Artificial Sequence: Synthetic polynucleotide
gatgcatctctgccttacctgcagaaagaaagcgtgttccagtctggcgcccacgcctacagaattcccgctctgctgtatctgccaggccagcagtctctgctggctttcgctgaacagcgggccagcaagaaggatgagcacgccgaactgatcgtgctgcggagaggcgattacgacgcccctacacatcaggtgcagtggcaggctcaagaggtggtggctcaggctagactggacggccacagatctatgaacccctgtcctctgtacgatgcccagaccggcacactgtttctgttctttatcgctatccccggccaagtgaccgagcagcagcagctgcagacaagagccaacgtgaccagactgtgtcaagtgacctccaccgaccacggcagaacctggtctagccctagagatctgaccgacgccgccatcggacctgcctatagagagtggtccaccttcgccgttggacctggacactgtctccagctgcacgacagggctagatctctggtggtgcctgcctacgcctatagaaagctgcaccccaaacagcggcctattcctagcgccttctgctttctgagccacgatcacggcaggacatgggccagaggacatttcgtggcccaggacacactggaatgccaggtggccgaagtggaaaccggcgagcagagagtcgtgaccctgaacgccagatctcacctgagagccagagtgcaggcccagagcacaaacgacggcctggatttccaagagagccagctggtcaagaaactggtggaacctcctccacagggctgtcagggaagcgtgatcagctttccatctcctagaagcggccctggctctcctgctcagtggctgctgtatacacaccccacacacagctggcagagagccgatctgggcgcctacctgaatcctagacctcctgctcctgaggcttggagcgaacctgttctgctggccaagggcagcgctgcctacagcgatctgcagtctatgggcacaggccctgatggcagccctctgtttggctgtctgtacgaggccaacgactacgaagagatcgtgttcctgatgttcaccctgaagcaggcctttccagccgagtacctgcctcaaggcggaggtggaagtggcggaggcggatccgacaaaactcacacatgcccaccgtgcccagcacctgaactcctggggggaccgtcagtcttcctcttccccccaaaacccaaggacaccctcatgatctcccggacccctgaggtcacatgcgtggtggtggacgtgagccacgaagaccctgaggtcaagttcaactggtacgtggacggcgtggaggtgcataatgccaagacaaagccgcgggaggagcagtacaacagcacgtaccgtgtggtcagcgtcctcaccgtcctgcaccaggactggctgaatggcaaggagtacaagtgcaaggtctccaacaaagccctcccagcccccatcgagaaaaccatctccaaagccaaagggcagccccgagaaccacaggtctacaccctgcccccatcccgggaggagatgaccaagaaccaggtcagcctgacctgcctggtcaaaggcttctatcccagcgacatcgccgtggagtgggagagcaatgggcagccggagaacaactacaagaccacgcctcccgtgctggactccgacggctccttcttcctcactagcaagctcaccgtggacaagagcaggtggcagcaggggaacgtcttctcatgctccgtgatgcatgaggctctgcacaaccactacacgcagaagagcctctccctgtctccgggtaaa

SEQ ID NO: 143 - protein, 612 aa, Artificial Sequence
  Description of Artificial Sequence: Synthetic polypeptide
DASLPYLQKESVFQSGAHAYRIPALLYLPGQQSLLAFAEQRASKKDEHAELIVLRRGDYDAGTHQVQWQAQEVVAQARLDGHRSMNPCPLYDEQTGTLFLFFIAIPGQVTEQQQLQTRANVTRLCYVTSTDHGRTWSSPRDLTDAAIGPAYREWSTFAVGPGHCLQLHDRARSLVVPAYAYRKLHPKQRPIPSAFCFLSHDHGRTWARGHFVAQDTLECQVAEVETGEQRVVTLNARSHLRARVQAQSTNDGLDFQESQLVKKLVEPPPTGCQGSVISFPSPRSGPGSPAQWLLYTHPTHSWQRADLGAYLNPRPPAPEAWSEPVLLAKGSAAYSDLQSMGTGPDGSPLFGCLYEANDYEEIVFLMFTLKQAFPAEYLPQEPKSSDKTHTCPPCPAPELLGGPSVFLFPPKPKDTLMISRTPEVTCVVVDVSHEDPEVKFNWYVDGVEVHNAKTKPREEQYNSTYRVVSVLTVLHQDWLNGKEYKCKVSNKALPAPIEKTISKAKGQPREPQVYTLPPSREEMTKNQVSLYCLVKGFYPSDIAVEWESNGQPENNYKTTPPVLDSDGSFFLYSKLTVDKSRWQQGNVFSCSVMHEALHNHYTQKSLSLSPGK

SEQ ID NO: 144 - DNA, 1836 bp, Artificial Sequence
  Description of Artificial Sequence: Synthetic polynucleotide
gatgcatctctgccttacctgcagaaagaaagcgtgttccagtctggcgcccacgcctacagaattcccgctctgctgtatctgccaggccagcagtctctgctggctttcgctgaacagcgggccagcaagaaggatgagcacgccgaactgatcgtgctgcggagaggcgattacgacgccggcacacatcaggtgcagtggcaggctcaagaggtggtggctcaggctagactggacggccacagatctatgaacccctgtcctctgtacgatgaacagaccggcacactgtttctgttctttatcgctatccccggccaagtgaccgagcagcagcagctgcagacaagagccaacgtgaccagactgtgttacgtgacctccaccgaccacggcagaacctggtctagccctagagatctgaccgacgccgccatcggacctgcctatagagagtggtccaccttcgccgttggacctggacactgtctccagctgcacgacagggctagatctctggtggtgcctgcctacgcctatagaaagctgcaccccaaacagcggcctattcctagcgccttctgctttctgagccacgatcacggcaggacatgggccagaggacatttcgtggcccaggacacactggaatgccaggtggccgaagtggaaaccggcgagcagagagtcgtgaccctgaacgccagatctcacctgagagccagagtgcaggcccagagcacaaacgacggcctggatttccaagagagccagctggtcaagaaactggtggaacctcctccaaccggctgtcagggaagcgtgatcagctttccatctcctagaagcggccctggctctcctgctcagtggctgctgtatacacaccccacacacagctggcagagagccgatctgggcgcctacctgaatcctagacctcctgctcctgaggcttggagcgaacctgttctgctggccaagggcagcgctgcctacagcgatctgcagtctatgggcacaggccctgatggcagccctctgtttggctgtctgtacgaggccaacgactacgaagagatcgtgttcctgatgttcaccctgaagcaggcctttccagccgagtacctgcctcaagagcccaaatcttctgacaaaactcacacatgcccaccgtgcccagcacctgaactcctggggggaccgtcagtcttcctcttccccccaaaacccaaggacaccctcatgatctcccggacccctgaggtcacatgcgtggtggtggacgtgagccacgaagaccctgaggtcaagttcaactggtacgtggacggcgtggaggtgcataatgccaagacaaagccgcgggaggagcagtacaacagcacgtaccgtgtggtcagcgtcctcaccgtcctgcaccaggactggctgaatggcaaggagtacaagtgcaaggtctccaacaaagccctcccagcccccatcgagaaaaccatctccaaagccaaagggcagccccgagaaccacaggtctacaccctgcccccatcccgggaggagatgaccaagaaccaggtcagcctgtactgcctggtcaaaggcttctatcccagcgacatcgccgtggagtgggagagcaatgggcagccggagaacaactacaagaccacgcctcccgtgctggactccgacggctccttcttcctctatagcaagctcaccgtggacaagagcaggtggcagcaggggaacgtcttctcatgctccgtgatgcatgaggctctgcacaaccactacacgcagaagagcctctccctgtctccgggtaaa

SEQ ID NO: 145 - protein, 612 aa, Artificial Sequence
  Description of Artificial Sequence: Synthetic polypeptide
DASLPYLQKESVFQSGAHAYRIPALLYLPGQQSLLAFAEQRASKKDEHAELIVLRRGDYDAGTHQVQWQAQEVVAQARLDGHRSMNPCPLYDEQTGTLFLFFIAIPGQVTEQQQLQTRANVTRLCYVTSTDHGRTWSSPRDLTDAAIGPAYREWSTFAVGPGHCLQLHDRARSLVVPAYAYRKLHPKQRPIPSAFCFLSHDHGRTWARGHFVAQDTLECQVAEVETGEQRVVTLNARSHLRFRVQAQSTNDGLDFQESQLVKKLVEPPPTGCQGSVISFPSPRSGPGSPAQWLLYTHPTHSWQRADLGAYLNPRPPAPEAWSEPVLLAKGSAAYSDLQSMGTGPDGSPLFGCLYEANDYEEIVFLMFTLKQAFPAEYLPQEPKSSDKTHTCPPCPAPELLGGPSVFLFPPKPKDTLMISRTPEVTCVVVDVSHEDPEVKFNWYVDGVEVHNAKTKPREEQYNSTYRVVSVLTVLHQDWLNGKEYKCKVSNKALPAPIEKTISKAKGQPREPQVYTLPPSREEMTKNQVSLYCLVKGFYPSDIAVEWESNGQPENNYKTTPPVLDSDGSFFLYSKLTVDKSRWQQGNVFSCSVMHEALHNHYTQKSLSLSPGK

SEQ ID NO: 146 - DNA, 1836 bp, Artificial Sequence
  Description of Artificial Sequence: Synthetic polynucleotide
gatgcatctctgccttacctgcagaaagaaagcgtgttccagtctggcgcccacgcctacagaattcccgctctgctgtatctgccaggccagcagtctctgctggctttcgctgaacagcgggccagcaagaaggatgagcacgccgaactgatcgtgctgcggagaggcgattacgacgccggcacacatcaggtgcagtggcaggctcaagaggtggtggctcaggctagactggacggccacagatctatgaacccctgtcctctgtacgatgaacagaccggcacactgtttctgttctttatcgctatccccggccaagtgaccgagcagcagcagctgcagacaagagccaacgtgaccagactgtgttacgtgacctccaccgaccacggcagaacctggtctagccctagagatctgaccgacgccgccatcggacctgcctatagagagtggtccaccttcgccgttggacctggacactgtctccagctgcacgacagggctagatctctggtggtgcctgcctacgcctatagaaagctgcaccccaaacagcggcctattcctagcgccttctgctttctgagccacgatcacggcaggacatgggccagaggacatttcgtggcccaggacacactggaatgccaggtggccgaagtggaaaccggcgagcagagagtcgtgaccctgaacgccagatctcacctgagattcagagtgcaggcccagagcacaaacgacggcctggatttccaagagagccagctggtcaagaaactggtggaacctcctccaaccggctgtcagggaagcgtgatcagctttccatctcctagaagcggccctggctctcctgctcagtggctgctgtatacacaccccacacacagctggcagagagccgatctgggcgcctacctgaatcctagacctcctgctcctgaggcttggagcgaacctgttctgctggccaagggcagcgctgcctacagcgatctgcagtctatgggcacaggccctgatggcagccctctgtttggctgtctgtacgaggccaacgactacgaagagatcgtgttcctgatgttcaccctgaagcaggcctttccagccgagtacctgcctcaagagcccaaatcttctgacaaaactcacacatgcccaccgtgcccagcacctgaactcctggggggaccgtcagtcttcctcttccccccaaaacccaaggacaccctcatgatctcccggacccctgaggtcacatgcgtggtggtggacgtgagccacgaagaccctgaggtcaagttcaactggtacgtggacggcgtggaggtgcataatgccaagacaaagccgcgggaggagcagtacaacagcacgtaccgtgtggtcagcgtcctcaccgtcctgcaccaggactggctgaatggcaaggagtacaagtgcaaggtctccaacaaagccctcccagcccccatcgagaaaaccatctccaaagccaaagggcagccccgagaaccacaggtctacaccctgcccccatcccgggaggagatgaccaagaaccaggtcagcctgtactgcctggtcaaaggcttctatcccagcgacatcgccgtggagtgggagagcaatgggcagccggagaacaactacaagaccacgcctcccgtgctggactccgacggctccttcttcctctatagcaagctcaccgtggacaagagcaggtggcagcaggggaacgtcttctcatgctccgtgatgcatgaggctctgcacaaccactacacgcagaagagcctctccctgtctccgggtaaa

SEQ ID NO: 147 - protein, 617 aa, Artificial Sequence
  Description of Artificial Sequence: Synthetic polypeptide
DASLPYLQDESVFQSGAHAYRIPALLYLPGQQSLLAFAEQRASKKDEHAELIVLRRGDYDAPTHQVQWQAQEVVAQARLDGHRSMNPCPLYDEQTGTLFLFFIAIPGQVTEQQQLQTRANVTRLCQVTSTDHGRTWSSPRDLTDAAIGPAYREWSTFAVGPGHCLQLHDRARSLVVPAYAYRKLHPKQRPIPSAFCFLSHDHGRTWARGHFVAQDTLANQVAEVETGEQRVVTLNARSHLRARVQAQSTNDGLDFQESQLVKKLVEPPPQGCQGSVISFPSPRSGPGSPAQWLLYTHPTHSWQRADLGAYLNPRPPAPEAWSEPVLLAKGSAAYSDLQSMGTGPDGSPLFGCLYEANDYEEIRFRMFTLKQAFPAEYLPQGGGGSGGGGSDKTHTCPPCPAPELLGGPSVFLFPPKPKDTLMISRTPEVTCVVVDVSHEDPEVKFNWYVDGVEVHNAKTKPREEQYNSTYRVVSVLTVLHQDWLNGKEYKCKVSNKALPAPIEKTISKAKGQPREPQVYTLPPSREEMTKNQVSLTCLVKGFYPSDIAVEWESNGQPENNYKTTPPVLDSDGSFFLTSKLTVDKSRWQQGNVFSCSVMHEALHNHYTQKSLSLSPGK

SEQ ID NO: 148 - DNA, 1851 bp, Artificial Sequence
  Description of Artificial Sequence: Synthetic polynucleotide
gatgcatctctgccttacctgcaggatgaaagcgtgttccagtctggcgcccacgcctacagaattcccgctctgctgtatctgccaggccagcagtctctgctggctttcgctgaacagcgggccagcaagaaggatgagcacgccgaactgatcgtgctgcggagaggcgattacgacgcccctacacatcaggtgcagtggcaggctcaagaggtggtggctcaggctagactggacggccacagatctatgaacccctgtcctctgtacgatgaacagaccggcacactgtttctgttctttatcgctatccccggccaagtgaccgagcagcagcagctgcagacaagagccaacgtgaccagactgtgtcaagtgacctccaccgaccacggcagaacctggtctagccctagagatctgaccgacgccgccatcggacctgcctatagagagtggtccaccttcgccgttggacctggacactgtctccagctgcacgacagggctagatctctggtggtgcctgcctacgcctatagaaagctgcaccccaaacagcggcctattcctagcgccttctgctttctgagccacgatcacggcaggacatgggccagaggacatttcgtggcccaggacacactggcgaatcaggtggccgaagtggaaaccggcgagcagagagtcgtgaccctgaacgccagatctcacctgagagccagagtgcaggcccagagcacaaacgacggcctggatttccaagagagccagctggtcaagaaactggtggaacctcctccacagggctgtcagggaagcgtgatcagctttccatctcctagaagcggccctggctctcctgctcagtggctgctgtatacacaccccacacacagctggcagagagccgatctgggcgcctacctgaatcctagacctcctgctcctgaggcttggagcgaacctgttctgctggccaagggcagcgctgcctacagcgatctgcagtctatgggcacaggccctgatggcagccctctgtttggctgtctgtacgaggccaacgactacgaagagatccgtttccgtatgttcaccctgaagcaggcctttccagccgagtacctgcctcaaggcggaggtggaagtggcggaggcggatccgacaaaactcacacatgcccaccgtgcccagcacctgaactcctggggggaccgtcagtcttcctcttccccccaaaacccaaggacaccctcatgatctcccggacccctgaggtcacatgcgtggtggtggacgtgagccacgaagaccctgaggtcaagttcaactggtacgtggacggcgtggaggtgcataatgccaagacaaagccgcgggaggagcagtacaacagcacgtaccgtgtggtcagcgtcctcaccgtcctgcaccaggactggctgaatggcaaggagtacaagtgcaaggtctccaacaaagccctcccagcccccatcgagaaaaccatctccaaagccaaagggcagccccgagaaccacaggtctacaccctgcccccatcccgggaggagatgaccaagaaccaggtcagcctgacctgcctggtcaaaggcttctatcccagcgacatcgccgtggagtgggagagcaatgggcagccggagaacaactacaagaccacgcctcccgtgctggactccgacggctccttcttcctcactagcaagctcaccgtggacaagagcaggtggcagcaggggaacgtcttctcatgctccgtgatgcatgaggctctgcacaaccactacacgcagaagagcctctccctgtctccgggtaaa

SEQ ID NO: 149 - protein, 450 aa, Artificial Sequence
  Description of Artificial Sequence: Synthetic polypeptide
EVQLVESGGGLVQPGGSLRLSCAASGFNIKDTYIHWVRQAPGKGLEWVARIYPTNGYTRYADSVKGRFTISADTSKNTAYLQMNSLRAEDTAVYYCSRWGGDGFYAMDYWGQGTLVTVSSASTKGPSVFPLAPSSKSTSGGTAALGCLVKDYFPEPVTVSWNSGALTSGVHTFPAVLQSSGLYSLSSVVTVPSSSLGTQTYICNVNHKPSNTKVDKKVEPKSCDKTHTCPPCPAPELLGGPSVFLFPPKPKDTLMISRTPEVTCVVVDVSHEDPEVKFNWYVDGVEVHNAKTKPREEQYNSTYRVVSVLTVLHQDWLNGKEYKCKVSNKALPAPIEKTISKAKGQPREPQVYTLPPSREEMTKNQVSLTCLVKGFYPSDIAVEWESNGQPENNYKTTPPVLDSDGSFFLTSKLTVDKSRWQQGNVFSCSVMHEALHNHYTQKSLSLSPGK

SEQ ID NO: 150 - DNA, 1350 bp, Artificial Sequence
  Description of Artificial Sequence: Synthetic polynucleotide
gaggtgcagctggttgaatctggcggaggactggttcagcctggcggatctctgagactgtcttgtgccgccagcggcttcaacatcaaggacacctacatccactgggtccgacaggcccctggcaaaggacttgaatgggtcgccagaatctaccccaccaacggctacaccagatacgccgactctgtgaagggcagattcaccatcagcgccgacaccagcaagaacaccgcctacctgcagatgaacagcctgagagccgaggacaccgccgtgtactactgttctagatggggaggcgacggcttctacgccatggattattggggccagggcaccctggtcaccgtttcttctgctagcaccaagggcccatccgtcttccccctggcaccctcctccaagagcacctctgggggcacagcggccctgggctgcctggtcaaggactacttccccgaaccggtgacggtgtcctggaactcaggcgctctgaccagcggcgtgcacaccttcccggctgtcctacagtcctcaggactctactccctcagcagcgtggtgaccgtgccctccagcagcttgggcacccagacctacatctgcaacgtgaatcacaagcccagcaacaccaaggtggacaagaaagttgagcccaaatcttgtgacaaaactcacacatgcccaccgtgcccagcacctgaactcctggggggaccgtcagtcttcctcttccccccaaaacccaaggacaccctcatgatctcccggacccctgaggtcacatgcgtggtggtggacgtgagccacgaagaccctgaggtcaagttcaactggtacgtggacggcgtggaggtgcataatgccaagacaaagccgcgggaggagcagtacaacagcacgtaccgtgtggtcagcgtcctcaccgtcctgcaccaggactggctgaatggcaaggagtacaagtgcaaggtctccaacaaagccctcccagcccccatcgagaaaaccatctccaaagccaaagggcagccccgagaaccacaggtctacaccctgcccccatcccgggaggagatgaccaagaaccaggtcagcctgacctgcctggtcaaaggcttctatcccagcgacatcgccgtggagtgggagagcaatgggcagccggagaacaactacaagaccacgcctcccgtgctggactccgacggctccttcttcctcactagcaagctcaccgtggacaagagcaggtggcagcaggggaacgtcttctcatgctccgtgatgcatgaggctctgcacaaccactacacgcagaagagcctctccctgtctccgggtaaa

SEQ ID NO: 151 - protein, 380 aa, Artificial Sequence
  Description of Artificial Sequence: Synthetic polypeptide
DASLPYLQKESVFQSGAHAYRIPALLYLPGQQSLLAFAEQRASKKDEHAELIVLRRGDYDAGTHQVQWQAQEVVAQARLDGHRSMNPCPLYDEQTGTLFLFFIAIPGQVTEQQQLQTRANVTRLCYVTSTDHGRTWSSPRDLTDAAIGPAYREWSTFAVGPGHCLQLHDRARSLVVPAYAYRKLHPKQRPIPSAFCFLSHDHGRTWARGHFVAQDTLECQVAEVETGEQRVVTLNARSHLRARVQAQSTNDGLDFQESQLVKKLVEPPPQGCQGSVISFPSPRSGPGSPAQWLLYTHPTHSWQRADLGAYLNPRPPAPEAWSEPVLLAKGSAAYSDLQSMGTGPDGSPLFGCLYEANDYEEIVFLMFTLKQAFPAEYLPQ

SEQ ID NO: 152 - protein, 612 aa, Artificial Sequence
  Description of Artificial Sequence: Synthetic polypeptide
DASLPYLQKESVFQSGAHAYRIPALLYLPGQQSLLAFAEQRASKKDEHAELIVLRRGDYDAGTHQVQWQAQEVVAQARLDGHRSMNPCPLYDEQTGTLFLFFIAIPGQVTEQQQLQTRANVTRLCYVTSTDHGRTWSSPRDLTDAAIGPAYREWSTFAVGPGHCLQLHDRARSLVVPAYAYRKLHPKQRPIPSAFCFLSHDHGRTWARGHFVAQDTLECQVAEVETGEQRVVTLNARSHLRARVQAQSTNDGLDFQESQLVKKLVEPPPQGCQGSVISFPSPRSGPGSPAQWLLYTHPTHSWQRADLGAYLNPRPPAPEAWSEPVLLAKGSAAYSDLQSMGTGPDGSPLFGCLYEANDYEEIVFLMFTLKQAFPAEYLPQEPKSSDKTHTCPPCPAPELLGGPSVFLFPPKPKDTLMISRTPEVTCVVVDVSHEDPEVKFNWYVDGVEVHNAKTKPREEQYNSTYRVVSVLTVLHQDWLNGKEYKCKVSNKALPAPIEKTISKAKGQPREPQVYTLPPSREEMTKNQVSLTCLVKGFYPSDIAVEWESNGQPENNYKTTPPVLDSDGSFFLTSKLTVDKSRWQQGNVFSCSVMHEALHNHYTQKSLSLSPGK

SEQ ID NO: 153 - protein, 869 aa, Artificial Sequence
  Description of Artificial Sequence: Synthetic polypeptide
DASLPYLQKESVFQSGAHAYRIPALLYLPGQQSLLAFAEQRASKKDEHAELIVLRRGDYDAGTHQVQWQAQEVVAQARLDGHRSMNPCPLYDEQTGTLFLFFIAIPGQVTEQQQLQTRANVTRLCYVTSTDHGRTWSSPRDLTDAAIGPAYREWSTFAVGPGHCLQLHDRARSLVVPAYAYRKLHPKQRPIPSAFCFLSHDHGRTWARGHFVAQDTLECQVAEVETGEQRVVTLNARSHLRARVQAQSTNDGLDFQESQLVKKLVEPPPQGCQGSVISFPSPRSGPGSPAQWLLYTHPTHSWQRADLGAYLNPRPPAPEAWSEPVLLAKGSAAYSDLQSMGTGPDGSPLFGCLYEANDYEEIVFLMFTLKQAFPAEYLPQEPKSSDKTHTCPPCPAPELLGGPSVFLFPPKPKDTLMISRTPEVTCVVVDVSHEDPEVKFNWYVDGVEVHNAKTKPREEQYNSTYRVVSVLTVLHQDWLNGKEYKCKVSNKALPAPIEKTISKAKGQPREPQVYTLPPSREEMTKNQVSLTCLVKGFYPSDIAVEWESNGQPENNYKTTPPVLDSDGSFFLYSKLTVDKSRWQQGNVFSCSVMHEALHNHYTQKSLSLSPGKGGGGSGGGGSGGGGSEVQLVESGGGLVQPGGSLRLSCAASGFNIKDTYIHWVRQAPGKGLEWVARIYPTNGYTRYADSVKGRFTISADTSKNTAYLQMNSLRAEDTAVYYCSRWGGDGFYAMDYWGQGTLVTVSSGGGGSGGGGSGGGGSDIQMTQSPSSLSASVGDRVTITCRASQDVNTAVAWYQQKPGKAPKLLIYSASFLYSGVPSRFSGSRSGTDFTLTISSLQPEDFATYYCQQHYTTPPTFGQGTKVEIK

SEQ ID NO: 154 - protein, 617 aa, Artificial Sequence
  Description of Artificial Sequence: Synthetic polypeptide
DASLPYLQKESVFQSGAHAYRIPALLYLPGQQSLLAFAEQRASKKDEHAELIVLRRGDYDAGTHQVQWQAQEVVAQARLDGHRSMNPCPLYDEQTGTLFLFFIAIPGQVTEQQQLQTRANVTRLCYVTSTDHGRTWSSPRDLTDAAIGPAYREWSTFAVGPGHCLQLHDRARSLVVPAYAYRKLHPKQRPIPSAFCFLSHDHGRTWARGHFVAQDTLECQVAEVETGEQRVVTLNARSHLRARVQAQSTNDGLDFQESQLVKKLVEPPPQGCQGSVISFPSPRSGPGSPAQWLLYTHPTHSWQRADLGAYLNPRPPAPEAWSEPVLLAKGSAAYSDLQSMGTGPDGSPLFGCLYEANDYEEIVFLMFTLKQAFPAEYLPQGGGGSGGGGSDKTHTCPPCPAPELLGGPSVFLFPPKPKDTLMISRTPEVTCVVVDVSHEDPEVKFNWYVDGVEVHNAKTKPREEQYNSTYRVVSVLTVLHQDWLNGKEYKCKVSNKALPAPIEKTISKAKGQPREPQVYTLPPSREEMTKNQVSLTCLVKGFYPSDIAVEWESNGQPENNYKTTPPVLDSDGSFFLTSKLTVDKSRWQQGNVFSCSVMHEALHNHYTQKSLSLSPGK

SEQ ID NO: 155 - protein, 874 aa, Artificial Sequence
  Description of Artificial Sequence: Synthetic polypeptide
DASLPYLQKESVFQSGAHAYRIPALLYLPGQQSLLAFAEQRASKKDEHAELIVLRRGDYDAGTHQVQWQAQEVVAQARLDGHRSMNPCPLYDEQTGTLFLFFIAIPGQVTEQQQLQTRANVTRLCYVTSTDHGRTWSSPRDLTDAAIGPAYREWSTFAVGPGHCLQLHDRARSLVVPAYAYRKLHPKQRPIPSAFCFLSHDHGRTWARGHFVAQDTLECQVAEVETGEQRVVTLNARSHLRARVQAQSTNDGLDFQESQLVKKLVEPPPQGCQGSVISFPSPRSGPGSPAQWLLYTHPTHSWQRADLGAYLNPRPPAPEAWSEPVLLAKGSAAYSDLQSMGTGPDGSPLFGCLYEANDYEEIVFLMFTLKQAFPAEYLPQGGGGSGGGGSDKTHTCPPCPAPELLGGPSVFLFPPKPKDTLMISRTPEVTCVVVDVSHEDPEVKFNWYVDGVEVHNAKTKPREEQYNSTYRVVSVLTVLHQDWLNGKEYKCKVSNKALPAPIEKTISKAKGQPREPQVYTLPPSREEMTKNQVSLTCLVKGFYPSDIAVEWESNGQPENNYKTTPPVLDSDGSFFLYSKLTVDKSRWQQGNVFSCSVMHEALHNHYTQKSLSLSPGKGGGGSGGGGSGGGGSEVQLVESGGGLVQPGGSLRLSCAASGFNIKDTYIHWVRQAPGKGLEWVARIYPTNGYTRYADSVKGRFTISADTSKNTAYLQMNSLRAEDTAVYYCSRWGGDGFYAMDYWGQGTLVTVSSGGGGSGGGGSGGGGSDIQMTQSPSSLSASVGDRVTITCRASQDVNTAVAWYQQKPGKAPKLLIYSASFLYSGVPSRFSGSRSGTDFTLTISSLQPEDFATYYCQQHYTTPPTFGQGTKVEIK

SEQ ID NO: 156 - protein, 10 aa, Artificial Sequence
  Description of Artificial Sequence: Synthetic 10xHis tag
HHHHHHHHHH

SEQ ID NO: 157 - protein, 6 aa, Artificial Sequence
  Description of Artificial Sequence: Synthetic 6xHis tag
HHHHHH

SEQ ID NO: 158 - protein, 15 aa, Artificial Sequence
  Description of Artificial Sequence: Synthetic peptide
  MISC_FEATURE (1)..(15): This sequence may encompass 1-5 "Gly Gly Pro" repeating units
GGPGGPGGPGGPGGP

SEQ ID NO: 159 - protein, 25 aa, Artificial Sequence
  Description of Artificial Sequence: Synthetic peptide
  MISC_FEATURE (1)..(25): This sequence may encompass 1-5 "Gly Gly Gly Gly Ser" repeating units
GGGGSGGGGSGGGGSGGGGSGGGGS

SEQ ID NO: 160 - protein, 5 aa, Homo sapiens
LHPIQ

SEQ ID NO: 161 - protein, 10 aa, Homo sapiens
TFAVGPGHCL

SEQ ID NO: 162 - protein, 6 aa, Homo sapiens
LRARVQ

SEQ ID NO: 163 - protein, 6 aa, Homo sapiens
LRCRVQ

SEQ ID NO: 164 - protein, 6 aa, Homo sapiens
LRAKVQ

SEQ ID NO: 165 - protein, 6 aa, Homo sapiens
LRARIQ

SEQ ID NO: 166 - protein, 6 aa, Homo sapiens
LRARPQ

SEQ ID NO: 167 - protein, 6 aa, Homo sapiens
LRCRKQ

SEQ ID NO: 168 - protein, 6 aa, Homo sapiens
LRRRRQ

SEQ ID NO: 169 - protein, 6 aa, Homo sapiens
LRRRHQ

SEQ ID NO: 170 - protein, 6 aa, Homo sapiens
LRTRPQ

SEQ ID NO: 171 - protein, 6 aa, Homo sapiens
LRYRPQ

SEQ ID NO: 172 - protein, 6 aa, Homo sapiens
LRNRPQ
